(19) United States
(12) Patent Application Publication
(10) Pub. No.: US 2025/0049896 A1
(43) Pub. Date: Feb. 13, 2025

(54) ANTI-TFR:ACID SPHINGOMYELINASE FOR TREATMENT OF ACID SPHINGOMYELINASE DEFICIENCY

(71) Applicant: Regeneron Pharmaceuticals, Inc., Tarrytown, NY (US)

(72) Inventors: Maria Praggastis, Cortlandt Manor, NY (US); Kalyani Nambiar, New York, NY (US); Leah Sabin, Goldens Bridge, NY (US); Katherine Cygnar, New York, NY (US)

(21) Appl. No.: 18/785,722

(22) Filed: Jul. 26, 2024

Related U.S. Application Data
(60) Provisional application No. 63/516,380, filed on Jul. 28, 2023.

(51) Int. Cl. A61K 38/46; A61K 48/00; C07K 16/28; C12N 9/16; C12N 9/22; C12N 15/11; C12N 15/86

(52) U.S. Cl. CPC A61K 38/465; A61K 48/0058; A61K 48/0066; C07K 16/2881; C12N 9/16; C12N 9/22; C12N 15/11; C12N 15/86; C12Y 301/04012; C07K 2317/55; C07K 2317/622; C12N 2310/20; C12N 2750/14143

(57) ABSTRACT

Multidomain therapeutic proteins comprising a TfR-binding delivery domain fused to an acid sphingomyelinase polypeptide and nucleic acid constructs and compositions that allow insertion of a multidomain therapeutic protein coding sequence into a target genomic locus such as an endogenous ALB locus and/or expression of the multidomain therapeutic protein coding sequence are provided. The multidomain therapeutic proteins and nucleic acid constructs and compositions can be administered to cells, populations of cells, or subjects and can be used in methods of integration of a multidomain therapeutic protein nucleic acid into a target genomic locus, methods of expression of a multidomain therapeutic protein in a cell, methods of treating acid sphingomyelinase deficiency in a subject, and methods of preventing or reducing the onset of a sign or symptom of acid sphingomyelinase deficiency in a subject.

### CROSS-REFERENCE TO RELATED APPLICATIONS

[0001] This application claims the benefit of U.S. Application No. 63/516,380, filed Jul. 28, 2023, which is herein incorporated by reference in its entirety for all purposes.

### REFERENCE TO A SEQUENCE LISTING SUBMITTED AS AN XML FILE

[0002] The Sequence Listing written in file 616965SEQLIST.xml is 1,131,940 bytes, was created on Jul. 24, 2024, and is hereby incorporated by reference.

### BACKGROUND

[0003] Acid sphingomyelinase deficiency (ASMD, also known as Niemann-Pick disease type A/B) is a lysosomal storage disorder caused by loss-of-function mutations in the sphingomyelin phosphodiesterase 1 (SMPD1) gene, which encodes the acid sphingomyelinase (ASM) protein. ASM breaks down sphingomyelin in lysosomes, and loss of ASM results in accumulation of lysosomal lipids, cell toxicity, and ultimately tissue pathology. Visceral ASMD presents as liver failure, hepatosplenomegaly, pulmonary infections, bleeding, and atherogenic lipid profile, with death in early-late adulthood. Patients with the more severe infantile neurovisceral form of ASMD also have severe neurological ataxia and hypotonia with death by age 3. Olipudase alfa is an enzyme replacement therapy and is the only approved therapy for ASMD, but it does not treat the CNS manifestations and requires frequent infusions.

### SUMMARY

[0004] Multidomain therapeutic proteins comprising a TfR-binding delivery domain fused to an acid sphingomyelinase (ASM) polypeptide and nucleic acid constructs and compositions that allow insertion of a multidomain therapeutic protein coding sequence into a target genomic locus such as an endogenous ALB locus and/or expression of the multidomain therapeutic protein coding sequence are provided. Cells comprising the multidomain therapeutic proteins or nucleic acid constructs are also provided. The multidomain therapeutic proteins and nucleic acid constructs and compositions can be administered to cells, populations of cells, or subjects and can be used in methods of integration of a multidomain therapeutic protein nucleic acid into a target genomic locus, methods of expression of a multidomain therapeutic protein in a cell, methods of treating acid sphingomyelinase deficiency (ASMD) in a subject, and methods of preventing or reducing the onset of a sign or symptom of ASMD in a subject.

[0005] In one aspect, provided are multidomain therapeutic proteins comprising a TfR-binding delivery domain fused to an acid sphingomyelinase polypeptide. In some such multidomain therapeutic proteins, the C-terminus of the TfR-binding delivery domain is fused to the N-terminus of the acid sphingomyelinase polypeptide. In some such multidomain therapeutic proteins, the C-terminus of the acid sphingomyelinase polypeptide is fused to the N-terminus of the TfR-binding delivery domain. In some such multidomain therapeutic proteins, the TfR-binding delivery domain is fused to the acid sphingomyelinase polypeptide via a peptide linker, optionally wherein the linker comprises, consists essentially of, or consists of the sequence set forth in any one of SEQ ID NOS: 808, 617, and 616, optionally wherein the linker comprises, consists essentially of, or consists of the sequence set forth in any one of SEQ ID NOS: 808 and 617. In some such multidomain therapeutic proteins, the linker comprises, consists essentially of, or consists of the sequence set forth in SEQ ID NO: 808. In some such multidomain therapeutic proteins, the linker comprises, consists essentially of, or consists of the sequence set forth in SEQ ID NO: 617. In some such multidomain therapeutic proteins, the linker comprises, consists essentially of, or consists of the sequence set forth in SEQ ID NO: 616. In some such multidomain therapeutic proteins, the acid sphingomyelinase polypeptide lacks the acid sphingomyelinase signal peptide. In some such multidomain therapeutic proteins, the acid sphingomyelinase polypeptide comprises, consists essentially of, or consists of the sequence set forth in SEQ ID NO: 728, 731, or 733, optionally wherein the acid sphingomyelinase polypeptide comprises, consists essentially of, or consists of the sequence set forth in SEQ ID NO: 733.

[0006] In some such multidomain therapeutic proteins, the TfR-binding delivery domain comprises an anti-TfR antigen-binding protein. Optionally, the antigen-binding protein binds to human transferrin receptor with a K_{D} of about 41 nM or a stronger affinity. Optionally, the antigen-binding protein binds to human transferrin receptor with a K_{D} of about 3 nM or a stronger affinity. Optionally, the antigen-binding protein binds to human transferrin receptor with a K_{D} of about 0.45 nM to 3 nM. In some such multidomain therapeutic proteins, the anti-TfR antigen binding protein comprises: (i) a HCVR that comprises the HCDR1, HCDR2 and HCDR3 of a HCVR comprising the amino acid sequence set forth in SEQ ID NO: 171, 181, 191, 201, 211, 221, 231, 241, 251, 261, 271, 281, 291, 301, 311, 321, 331, 341, 351, 361, 371, 381, 391, 401, 411, 421, 431, 441, 451, 461, 471, or 481 (or a variant thereof); and/or (ii) a LCVR that comprises the LCDR1, LCDR2 and LCDR3 of a LCVR comprising the amino acid sequence set forth in SEQ ID NO: 176, 186, 196, 206, 216, 226, 236, 246, 256, 266, 276, 286, 296, 306, 316, 326, 336, 346, 356, 366, 376, 386, 396, 406, 416, 426, 436, 446, 456, 466, 476, or 486 (or a variant thereof).

[0007] In some such multidomain therapeutic proteins, the anti-TfR antigen binding protein comprises: (1) a HCVR comprising the HCDR1, HCDR2 and HCDR3 of a HCVR that comprises the amino acid sequence set forth in SEQ ID NO: 171 (or a variant thereof); and a LCVR comprising the LCDR1, LCDR2 and LCDR3 of a LCVR that comprises the amino acid sequence set forth in SEQ ID NO: 176 (or a variant thereof); (2) a HCVR comprising the HCDR1, HCDR2 and HCDR3 of a HCVR that comprises the amino acid sequence set forth in SEQ ID NO: 181 (or a variant thereof); and a LCVR comprising the LCDR1, LCDR2 and LCDR3 of a LCVR that comprises the amino acid sequence set forth in SEQ ID NO: 186 (or a variant thereof); (3) a HCVR comprising the HCDR1, HCDR2 and HCDR3 of a HCVR that comprises the amino acid sequence set forth in SEQ ID NO: 191 (or a variant thereof); and a LCVR comprising the LCDR1, LCDR2 and LCDR3 of a LCVR that comprises the amino acid sequence set forth in SEQ ID NO: 196 (or a variant thereof); (4) a HCVR comprising the HCDR1, HCDR2 and HCDR3 of a HCVR that comprises the amino acid sequence set forth in SEQ ID NO: 201 (or a variant thereof); and a LCVR comprising the LCDR1, LCDR2 and LCDR3 of a LCVR that comprises the amino acid sequence set forth in SEQ ID NO: 206 (or a variant thereof); (5) a HCVR comprising the HCDR1, HCDR2 and HCDR3 of a HCVR that comprises the amino acid sequence set forth in SEQ ID NO: 211 (or a variant thereof); and a LCVR comprising the LCDR1, LCDR2 and LCDR3 of a LCVR that comprises the amino acid sequence set forth in SEQ ID NO: 216 (or a variant thereof); (6) a HCVR comprising the HCDR1, HCDR2 and HCDR3 of a HCVR that comprises the amino acid sequence set forth in SEQ ID NO: 221 (or a variant thereof); and a LCVR comprising the LCDR1, LCDR2 and LCDR3 of a LCVR that comprises the amino acid sequence set forth in SEQ ID NO: 226 (or a variant thereof); (7) a HCVR comprising the HCDR1, HCDR2 and HCDR3 of a HCVR that comprises the amino acid sequence set forth in SEQ ID NO: 231 (or a variant thereof); and a LCVR comprising the LCDR1, LCDR2 and LCDR3 of a LCVR that comprises the amino acid sequence set forth in SEQ ID NO: 236 (or a variant thereof); (8) a HCVR comprising the HCDR1, HCDR2 and HCDR3 of a HCVR that comprises the amino acid sequence set forth in SEQ ID NO: 241 (or a variant thereof); and a LCVR comprising the LCDR1, LCDR2 and LCDR3 of a LCVR that comprises the amino acid sequence set forth in SEQ ID NO: 246 (or a variant thereof); (9) a HCVR comprising the HCDR1, HCDR2 and HCDR3 of a HCVR that comprises the amino acid sequence set forth in SEQ ID NO: 251 (or a variant thereof); and a LCVR comprising the LCDR1, LCDR2 and LCDR3 of a LCVR that comprises the amino acid sequence set forth in SEQ ID NO: 256 (or a variant thereof); (10) a HCVR comprising the HCDR1, HCDR2 and HCDR3 of a HCVR that comprises the amino acid sequence set forth in SEQ ID NO: 261 (or a variant thereof); and a LCVR comprising the LCDR1, LCDR2 and LCDR3 of a LCVR that comprises the amino acid sequence set forth in SEQ ID NO: 266 (or a variant thereof); (11) a HCVR comprising the HCDR1, HCDR2 and HCDR3 of a HCVR that comprises the amino acid sequence set forth in SEQ ID NO: 271 (or a variant thereof); and a LCVR comprising the LCDR1, LCDR2 and LCDR3 of a LCVR that comprises the amino acid sequence set forth in SEQ ID NO: 276 (or a variant thereof); (12) a HCVR comprising the HCDR1, HCDR2 and HCDR3 of a HCVR that comprises the amino acid sequence set forth in SEQ ID NO: 281 (or a variant thereof); and a LCVR comprising the LCDR1, LCDR2 and LCDR3 of a LCVR that comprises the amino acid sequence set forth in SEQ ID NO: 286 (or a variant thereof); (13) a HCVR comprising the HCDR1, HCDR2 and HCDR3 of a HCVR that comprises the amino acid sequence set forth in SEQ ID NO: 291 (or a variant thereof); and a LCVR comprising the LCDR1, LCDR2 and LCDR3 of a LCVR that comprises the amino acid sequence set forth in SEQ ID NO: 296 (or a variant thereof); (14) a HCVR comprising the HCDR1, HCDR2 and HCDR3 of a HCVR that comprises the amino acid sequence set forth in SEQ ID NO: 301 (or a variant thereof); and a LCVR comprising the LCDR1, LCDR2 and LCDR3 of a LCVR that comprises the amino acid sequence set forth in SEQ ID NO: 306 (or a variant thereof); (15) a HCVR comprising the HCDR1, HCDR2 and HCDR3 of a HCVR that comprises the amino acid sequence set forth in SEQ ID NO: 311 (or a variant thereof); and a LCVR comprising the LCDR1, LCDR2 and LCDR3 of a LCVR that comprises the amino acid sequence set forth in SEQ ID NO: 316 (or a variant thereof); (16) a HCVR comprising the HCDR1, HCDR2 and HCDR3 of a HCVR that comprises the amino acid sequence set forth in SEQ ID NO: 321 (or a variant thereof); and a LCVR comprising the LCDR1, LCDR2 and LCDR3 of a LCVR that comprises the amino acid sequence set forth in SEQ ID NO: 326 (or a variant thereof); (17) a HCVR comprising the HCDR1, HCDR2 and HCDR3 of a HCVR that comprises the amino acid sequence set forth in SEQ ID NO: 331 (or a variant thereof); and a LCVR comprising the LCDR1, LCDR2 and LCDR3 of a LCVR that comprises the amino acid sequence set forth in SEQ ID NO: 336 (or a variant thereof); (18) a HCVR comprising the HCDR1, HCDR2 and HCDR3 of a HCVR that comprises the amino acid sequence set forth in SEQ ID NO: 341 (or a variant thereof); and a LCVR comprising the LCDR1, LCDR2 and LCDR3 of a LCVR that comprises the amino acid sequence set forth in SEQ ID NO: 346 (or a variant thereof); (19) a HCVR comprising the HCDR1, HCDR2 and HCDR3 of a HCVR that comprises the amino acid sequence set forth in SEQ ID NO: 351 (or a variant thereof); and a LCVR comprising the LCDR1, LCDR2 and LCDR3 of a LCVR that comprises the amino acid sequence set forth in SEQ ID NO: 356 (or a variant thereof); (20) a HCVR comprising the HCDR1, HCDR2 and HCDR3 of a HCVR that comprises the amino acid sequence set forth in SEQ ID NO: 361 (or a variant thereof); and a LCVR comprising the LCDR1, LCDR2 and LCDR3 of a LCVR that comprises the amino acid sequence set forth in SEQ ID NO: 366 (or a variant thereof); (21) a HCVR comprising the HCDR1, HCDR2 and HCDR3 of a HCVR that comprises the amino acid sequence set forth in SEQ ID NO: 371 (or a variant thereof); and a LCVR comprising the LCDR1, LCDR2 and LCDR3 of a LCVR that comprises the amino acid sequence set forth in SEQ ID NO: 376 (or a variant thereof); (22) a HCVR comprising the HCDR1, HCDR2 and HCDR3 of a HCVR that comprises the amino acid sequence set forth in SEQ ID NO: 381 (or a variant thereof); and a LCVR comprising the LCDR1, LCDR2 and LCDR3 of a LCVR that comprises the amino acid sequence set forth in SEQ ID NO: 386 (or a variant thereof); (23) a HCVR comprising the HCDR1, HCDR2 and HCDR3 of a HCVR that comprises the amino acid sequence set forth in SEQ ID NO: 391 (or a variant thereof); and a LCVR comprising the LCDR1, LCDR2 and LCDR3 of a LCVR that comprises the amino acid sequence set forth in SEQ ID NO: 396 (or a variant thereof); (24) a HCVR comprising the HCDR1, HCDR2 and HCDR3 of a HCVR that comprises the amino acid sequence set forth in SEQ ID NO: 401 (or a variant thereof); and a LCVR comprising the LCDR1, LCDR2 and LCDR3 of a LCVR that comprises the amino acid sequence set forth in SEQ ID NO: 406 (or a variant thereof); (25) a HCVR comprising the HCDR1, HCDR2 and HCDR3 of a HCVR that comprises the amino acid sequence set forth in SEQ ID NO: 411 (or a variant thereof); and a LCVR comprising the LCDR1, LCDR2 and LCDR3 of a LCVR that comprises the amino acid sequence set forth in SEQ ID NO: 416 (or a variant thereof); (26) a HCVR comprising the HCDR1, HCDR2 and HCDR3 of a HCVR that comprises the amino acid sequence set forth in SEQ ID NO: 421 (or a variant thereof); and a LCVR comprising the LCDR1, LCDR2 and LCDR3 of a LCVR that comprises the amino acid sequence set forth in SEQ ID NO: 426 (or a variant thereof); (27) a HCVR comprising the HCDR1, HCDR2 and HCDR3 of a HCVR that comprises the amino acid sequence set forth in SEQ ID NO: 431 (or a variant thereof); and a LCVR comprising the LCDR1, LCDR2 and LCDR3 of a LCVR that comprises the amino acid sequence set forth in SEQ ID NO: 436 (or a variant thereof); (28) a HCVR comprising the HCDR1, HCDR2 and HCDR3 of a HCVR that comprises the amino acid sequence set forth in SEQ ID NO: 441 (or a variant thereof); and a LCVR comprising the LCDR1, LCDR2 and LCDR3 of a LCVR that comprises the amino acid sequence set forth in SEQ ID NO: 446 (or a variant thereof); (29) a HCVR comprising the HCDR1, HCDR2 and HCDR3 of a HCVR that comprises the amino acid sequence set forth in SEQ ID NO: 451 (or a variant thereof); and a LCVR comprising the LCDR1, LCDR2 and LCDR3 of a LCVR that comprises the amino acid sequence set forth in SEQ ID NO: 456 (or a variant thereof); (30) a HCVR comprising the HCDR1, HCDR2 and HCDR3 of a HCVR that comprises the amino acid sequence set forth in SEQ ID NO: 461 (or a variant thereof); and a LCVR comprising the LCDR1, LCDR2 and LCDR3 of a LCVR that comprises the amino acid sequence set forth in SEQ ID NO: 466 (or a variant thereof); (31) a HCVR comprising the HCDR1, HCDR2 and HCDR3 of a HCVR that comprises the amino acid sequence set forth in SEQ ID NO: 471 (or a variant thereof); and a LCVR comprising the LCDR1, LCDR2 and LCDR3 of a LCVR that comprises the amino acid sequence set forth in SEQ ID NO: 476 (or a variant thereof); or (32) a HCVR comprising the HCDR1, HCDR2 and HCDR3 of a HCVR that comprises the amino acid sequence set forth in SEQ ID NO: 481 (or a variant thereof); and a LCVR comprising the LCDR1, LCDR2 and LCDR3 of a LCVR that comprises the amino acid sequence set forth in SEQ ID NO: 486 (or a variant thereof).

[0008] In some such multidomain therapeutic proteins, the anti-TfR antigen binding protein comprises: (1) a HCVR comprising the HCDR1, HCDR2 and HCDR3 of a HCVR that comprises the amino acid sequence set forth in SEQ ID NO: 391 (or a variant thereof); and a LCVR comprising the LCDR1, LCDR2 and LCDR3 of a LCVR that comprises the amino acid sequence set forth in SEQ ID NO: 396 (or a variant thereof); or (2) a HCVR comprising the HCDR1, HCDR2 and HCDR3 of a HCVR that comprises the amino acid sequence set forth in SEQ ID NO: 411 (or a variant thereof); and a LCVR comprising the LCDR1, LCDR2 and LCDR3 of a LCVR that comprises the amino acid sequence set forth in SEQ ID NO: 416 (or a variant thereof). In some such multidomain therapeutic proteins, the anti-TfR antigen binding protein comprises: a HCVR comprising the HCDR1, HCDR2 and HCDR3 of a HCVR that comprises the amino acid sequence set forth in SEQ ID NO: 391 (or a variant thereof); and a LCVR comprising the LCDR1, LCDR2 and LCDR3 of a LCVR that comprises the amino acid sequence set forth in SEQ ID NO: 396 (or a variant thereof).

[0009] In some such multidomain therapeutic proteins, the anti-TfR antigen binding protein comprises: (a) a HCVR that comprises: an HCDR1 comprising the amino acid sequence set forth in SEQ ID NO: 172 (or a variant thereof), an HCDR2 comprising the amino acid sequence set forth in SEQ ID NO: 173 (or a variant thereof), and an HCDR3 comprising the amino acid sequence set forth in SEQ ID NO: 174 (or a variant thereof); and a LCVR that comprises: an LCDR1 comprising the amino acid sequence set forth in SEQ ID NO: 177 (or a variant thereof), an LCDR2 comprising the amino acid sequence set forth in SEQ ID NO: 178 (or a variant thereof), and an LCDR3 comprising the amino acid sequence set forth in SEQ ID NO: 179 (or a variant thereof); (b) a HCVR that comprises: an HCDR1 comprising the amino acid sequence set forth in SEQ ID NO: 182 (or a variant thereof), an HCDR2 comprising the amino acid sequence set forth in SEQ ID NO: 183 (or a variant thereof), and an HCDR3 comprising the amino acid sequence set forth in SEQ ID NO: 184 (or a variant thereof); and a LCVR that comprises: an LCDR1 comprising the amino acid sequence set forth in SEQ ID NO: 187 (or a variant thereof), an LCDR2 comprising the amino acid sequence set forth in SEQ ID NO: 188 (or a variant thereof), and an LCDR3 comprising the amino acid sequence set forth in SEQ ID NO: 189 (or a variant thereof); (c) a HCVR that comprises: an HCDR1 comprising the amino acid sequence set forth in SEQ ID NO: 192 (or a variant thereof), an HCDR2 comprising the amino acid sequence set forth in SEQ ID NO: 193 (or a variant thereof), and an HCDR3 comprising the amino acid sequence set forth in SEQ ID NO: 194 (or a variant thereof); and a LCVR that comprises: an LCDR1 comprising the amino acid sequence set forth in SEQ ID NO: 197 (or a variant thereof), an LCDR2 comprising the amino acid sequence set forth in SEQ ID NO: 198 (or a variant thereof), and an LCDR3 comprising the amino acid sequence set forth in SEQ ID NO: 199 (or a variant thereof); (d) a HCVR that comprises: an HCDR1 comprising the amino acid sequence set forth in SEQ ID NO: 202 (or a variant thereof), an HCDR2 comprising the amino acid sequence set forth in SEQ ID NO: 203 (or a variant thereof), and an HCDR3 comprising the amino acid sequence set forth in SEQ ID NO: 204 (or a variant thereof); and a LCVR that comprises: an LCDR1 comprising the amino acid sequence set forth in SEQ ID NO: 207 (or a variant thereof), an LCDR2 comprising the amino acid sequence set forth in SEQ ID NO: 208 (or a variant thereof), and an LCDR3 comprising the amino acid sequence set forth in SEQ ID NO: 209 (or a variant thereof); (e) a HCVR that comprises: an HCDR1 comprising the amino acid sequence set forth in SEQ ID NO: 212 (or a variant thereof), an HCDR2 comprising the amino acid sequence set forth in SEQ ID NO: 213 (or a variant thereof), and an HCDR3 comprising the amino acid sequence set forth in SEQ ID NO: 214 (or a variant thereof); and a LCVR that comprises: an LCDR1 comprising the amino acid sequence set forth in SEQ ID NO: 217 (or a variant thereof), an LCDR2 comprising the amino acid sequence set forth in SEQ ID NO: 218 (or a variant thereof), and an LCDR3 comprising the amino acid sequence set forth in SEQ ID NO: 219 (or a variant thereof); (f) a HCVR that comprises: an HCDR1 comprising the amino acid sequence set forth in SEQ ID NO: 222 (or a variant thereof), an HCDR2 comprising the amino acid sequence set forth in SEQ ID NO: 223 (or a variant thereof), and an HCDR3 comprising the amino acid sequence set forth in SEQ ID NO: 224 (or a variant thereof); and a LCVR that comprises: an LCDR1 comprising the amino acid sequence set forth in SEQ ID NO: 227 (or a variant thereof), an LCDR2 comprising the amino acid sequence set forth in SEQ ID NO: 228 (or a variant thereof), and an LCDR3 comprising the amino acid sequence set forth in SEQ ID NO: 229 (or a variant thereof); (g) a HCVR that comprises: an HCDR1 comprising the amino acid sequence set forth in SEQ ID NO: 232 (or a variant thereof), an HCDR2 comprising the amino acid sequence set forth in SEQ ID NO: 233 (or a variant thereof), and an HCDR3 comprising the amino acid sequence set forth in SEQ ID NO: 234 (or a variant thereof); and a LCVR that comprises: an LCDR1 comprising the amino acid sequence set forth in SEQ ID NO: 237 (or a variant thereof), an LCDR2 comprising the amino acid sequence set forth in SEQ ID NO: 238 (or a variant thereof), and an LCDR3 comprising the amino acid sequence set forth in SEQ ID NO: 239 (or a variant thereof); (h) a HCVR that comprises: an HCDR1 comprising the amino acid sequence set forth in SEQ ID NO: 242 (or a variant thereof), an HCDR2 comprising the amino acid sequence set forth in SEQ ID NO: 243 (or a variant thereof), and an HCDR3 comprising the amino acid sequence set forth in SEQ ID NO: 244 (or a variant thereof); and a LCVR that comprises: an LCDR1 comprising the amino acid sequence set forth in SEQ ID NO: 247 (or a variant thereof), an LCDR2 comprising the amino acid sequence set forth in SEQ ID NO: 248 (or a variant thereof), and an LCDR3 comprising the amino acid sequence set forth in SEQ ID NO: 249 (or a variant thereof); (i) a HCVR that comprises: an HCDR1 comprising the amino acid sequence set forth in SEQ ID NO: 252 (or a variant thereof), an HCDR2 comprising the amino acid sequence set forth in SEQ ID NO: 253 (or a variant thereof), and an HCDR3 comprising the amino acid sequence set forth in SEQ ID NO: 254 (or a variant thereof); and a LCVR that comprises: an LCDR1 comprising the amino acid sequence set forth in SEQ ID NO: 257 (or a variant thereof), an LCDR2 comprising the amino acid sequence set forth in SEQ ID NO: 258 (or a variant thereof), and an LCDR3 comprising the amino acid sequence set forth in SEQ ID NO: 259 (or a variant thereof); (j) a HCVR that comprises: an HCDR1 comprising the amino acid sequence set forth in SEQ ID NO: 262 (or a variant thereof), an HCDR2 comprising the amino acid sequence set forth in SEQ ID NO: 263 (or a variant thereof), and an HCDR3 comprising the amino acid sequence set forth in SEQ ID NO: 264 (or a variant thereof); and a LCVR that comprises: an LCDR1 comprising the amino acid sequence set forth in SEQ ID NO: 267 (or a variant thereof), an LCDR2 comprising the amino acid sequence set forth in SEQ ID NO: 268 (or a variant thereof), and an LCDR3 comprising the amino acid sequence set forth in SEQ ID NO: 269 (or a variant thereof); (k) a HCVR that comprises: an HCDR1 comprising the amino acid sequence set forth in SEQ ID NO: 272 (or a variant thereof), an HCDR2 comprising the amino acid sequence set forth in SEQ ID NO: 273 (or a variant thereof), and an HCDR3 comprising the amino acid sequence set forth in SEQ ID NO: 274 (or a variant thereof); and a LCVR that comprises: an LCDR1 comprising the amino acid sequence set forth in SEQ ID NO: 277 (or a variant thereof), an LCDR2 comprising the amino acid sequence set forth in SEQ ID NO: 278 (or a variant thereof), and an LCDR3 comprising the amino acid sequence set forth in SEQ ID NO: 279 (or a variant thereof); (1) a HCVR that comprises: an HCDR1 comprising the amino acid sequence set forth in SEQ ID NO: 282 (or a variant thereof), an HCDR2 comprising the amino acid sequence set forth in SEQ ID NO: 283 (or a variant thereof), and an HCDR3 comprising the amino acid sequence set forth in SEQ ID NO: 284 (or a variant thereof); and a LCVR that comprises: an LCDR1 comprising the amino acid sequence set forth in SEQ ID NO: 287 (or a variant thereof), an LCDR2 comprising the amino acid sequence set forth in SEQ ID NO: 288 (or a variant thereof), and an LCDR3 comprising the amino acid sequence set forth in SEQ ID NO: 289 (or a variant thereof); (m) a HCVR that comprises: an HCDR1 comprising the amino acid sequence set forth in SEQ ID NO: 292 (or a variant thereof), an HCDR2 comprising the amino acid sequence set forth in SEQ ID NO: 293 (or a variant thereof), and an HCDR3 comprising the amino acid sequence set forth in SEQ ID NO: 294 (or a variant thereof); and a LCVR that comprises: an LCDR1 comprising the amino acid sequence set forth in SEQ ID NO: 297 (or a variant thereof), an LCDR2 comprising the amino acid sequence set forth in SEQ ID NO: 298 (or a variant thereof), and an LCDR3 comprising the amino acid sequence set forth in SEQ ID NO: 299 (or a variant thereof); (n) a HCVR that comprises: an HCDR1 comprising the amino acid sequence set forth in SEQ ID NO: 302 (or a variant thereof), an HCDR2 comprising the amino acid sequence set forth in SEQ ID NO: 303 (or a variant thereof), and an HCDR3 comprising the amino acid sequence set forth in SEQ ID NO: 304 (or a variant thereof); and a LCVR that comprises: an LCDR1 comprising the amino acid sequence set forth in SEQ ID NO: 307 (or a variant thereof), an LCDR2 comprising the amino acid sequence set forth in SEQ ID NO: 308 (or a variant thereof), and an LCDR3 comprising the amino acid sequence set forth in SEQ ID NO: 309 (or a variant thereof); (o) a HCVR that comprises: an HCDR1 comprising the amino acid sequence set forth in SEQ ID NO: 312 (or a variant thereof), an HCDR2 comprising the amino acid sequence set forth in SEQ ID NO: 313 (or a variant thereof), and an HCDR3 comprising the amino acid sequence set forth in SEQ ID NO: 314 (or a variant thereof); and a LCVR that comprises: an LCDR1 comprising the amino acid sequence set forth in SEQ ID NO: 317 (or a variant thereof), an LCDR2 comprising the amino acid sequence set forth in SEQ ID NO: 318 (or a variant thereof), and an LCDR3 comprising the amino acid sequence set forth in SEQ ID NO: 319 (or a variant thereof); (p) a HCVR that comprises: an HCDR1 comprising the amino acid sequence set forth in SEQ ID NO: 322 (or a variant thereof), an HCDR2 comprising the amino acid sequence set forth in SEQ ID NO: 323 (or a variant thereof), and an HCDR3 comprising the amino acid sequence set forth in SEQ ID NO: 324 (or a variant thereof); and a LCVR that comprises: an LCDR1 comprising the amino acid sequence set forth in SEQ ID NO: 327 (or a variant thereof), an LCDR2 comprising the amino acid sequence set forth in SEQ ID NO: 328 (or a variant thereof), and an LCDR3 comprising the amino acid sequence set forth in SEQ ID NO: 329 (or a variant thereof); (q) a HCVR that comprises: an HCDR1 comprising the amino acid sequence set forth in SEQ ID NO: 332 (or a variant thereof), an HCDR2 comprising the amino acid sequence set forth in SEQ ID NO: 333 (or a variant thereof), and an HCDR3 comprising the amino acid sequence set forth in SEQ ID NO: 334 (or a variant thereof); and a LCVR that comprises: an LCDR1 comprising the amino acid sequence set forth in SEQ ID NO: 337 (or a variant thereof), an LCDR2 comprising the amino acid sequence set forth in SEQ ID NO: 338 (or a variant thereof), and an LCDR3 comprising the amino acid sequence set forth in SEQ ID NO: 339 (or a variant thereof); (r) a HCVR that comprises: an HCDR1 comprising the amino acid sequence set forth in SEQ ID NO: 342 (or a variant thereof), an HCDR2 comprising the amino acid sequence set forth in SEQ ID NO: 343 (or a variant thereof), and an HCDR3 comprising the amino acid sequence set forth in SEQ ID NO: 344 (or a variant thereof); and a LCVR that comprises: an LCDR1 comprising the amino acid sequence set forth in SEQ ID NO: 347 (or a variant thereof), an LCDR2 comprising the amino acid sequence set forth in SEQ ID NO: 348 (or a variant thereof), and an LCDR3 comprising the amino acid sequence set forth in SEQ ID NO: 349 (or a variant thereof); (s) a HCVR that comprises: an HCDR1 comprising the amino acid sequence set forth in SEQ ID NO: 352 (or a variant thereof), an HCDR2 comprising the amino acid sequence set forth in SEQ ID NO: 353 (or a variant thereof), and an HCDR3 comprising the amino acid sequence set forth in SEQ ID NO: 354 (or a variant thereof); and a LCVR that comprises: an LCDR1 comprising the amino acid sequence set forth in SEQ ID NO: 357 (or a variant thereof), an LCDR2 comprising the amino acid sequence set forth in SEQ ID NO: 358 (or a variant thereof), and an LCDR3 comprising the amino acid sequence set forth in SEQ ID NO: 359 (or a variant thereof); (t) a HCVR that comprises: an HCDR1 comprising the amino acid sequence set forth in SEQ ID NO: 362 (or a variant thereof), an HCDR2 comprising the amino acid sequence set forth in SEQ ID NO: 363 (or a variant thereof), and an HCDR3 comprising the amino acid sequence set forth in SEQ ID NO: 364 (or a variant thereof); and a LCVR that comprises: an LCDR1 comprising the amino acid sequence set forth in SEQ ID NO: 367 (or a variant thereof), an LCDR2 comprising the amino acid sequence set forth in SEQ ID NO: 368 (or a variant thereof), and an LCDR3 comprising the amino acid sequence set forth in SEQ ID NO: 369 (or a variant thereof); (u) a HCVR that comprises: an HCDR1 comprising the amino acid sequence set forth in SEQ ID NO: 372 (or a variant thereof), an HCDR2 comprising the amino acid sequence set forth in SEQ ID NO: 373 (or a variant thereof), and an HCDR3 comprising the amino acid sequence set forth in SEQ ID NO: 374 (or a variant thereof); and a LCVR that comprises: an LCDR1 comprising the amino acid sequence set forth in SEQ ID NO: 377 (or a variant thereof), an LCDR2 comprising the amino acid sequence set forth in SEQ ID NO: 378 (or a variant thereof), and an LCDR3 comprising the amino acid sequence set forth in SEQ ID NO: 379 (or a variant thereof); (v) a HCVR that comprises: an HCDR1 comprising the amino acid sequence set forth in SEQ ID NO: 382 (or a variant thereof), an HCDR2 comprising the amino acid sequence set forth in SEQ ID NO: 383 (or a variant thereof), and an HCDR3 comprising the amino acid sequence set forth in SEQ ID NO: 384 (or a variant thereof); and a LCVR that comprises: an LCDR1 comprising the amino acid sequence set forth in SEQ ID NO: 387 (or a variant thereof), an LCDR2 comprising the amino acid sequence set forth in SEQ ID NO: 388 (or a variant thereof), and an LCDR3 comprising the amino acid sequence set forth in SEQ ID NO: 389 (or a variant thereof); (w) a HCVR that comprises: an HCDR1 comprising the amino acid sequence set forth in SEQ ID NO: 392 (or a variant thereof), an HCDR2 comprising the amino acid sequence set forth in SEQ ID NO: 393 (or a variant thereof), and an HCDR3 comprising the amino acid sequence set forth in SEQ ID NO: 394 (or a variant thereof); and a LCVR that comprises: an LCDR1 comprising the amino acid sequence set forth in SEQ ID NO: 397 (or a variant thereof), an LCDR2 comprising the amino acid sequence set forth in SEQ ID NO: 398 (or a variant thereof), and an LCDR3 comprising the amino acid sequence set forth in SEQ ID NO: 399 (or a variant thereof); (x) a HCVR that comprises: an HCDR1 comprising the amino acid sequence set forth in SEQ ID NO: 402 (or a variant thereof), an HCDR2 comprising the amino acid sequence set forth in SEQ ID NO: 403 (or a variant thereof), and an HCDR3 comprising the amino acid sequence set forth in SEQ ID NO: 404 (or a variant thereof); and a LCVR that comprises: an LCDR1 comprising the amino acid sequence set forth in SEQ ID NO: 407 (or a variant thereof), an LCDR2 comprising the amino acid sequence set forth in SEQ ID NO: 408 (or a variant thereof), and an LCDR3 comprising the amino acid sequence set forth in SEQ ID NO: 409 (or a variant thereof); (y) a HCVR that comprises: an HCDR1 comprising the amino acid sequence set forth in SEQ ID NO: 412 (or a variant thereof), an HCDR2 comprising the amino acid sequence set forth in SEQ ID NO: 413 (or a variant thereof), and an HCDR3 comprising the amino acid sequence set forth in SEQ ID NO: 414 (or a variant thereof); and a LCVR that comprises: an LCDR1 comprising the amino acid sequence set forth in SEQ ID NO: 417 (or a variant thereof), an LCDR2 comprising the amino acid sequence set forth in SEQ ID NO: 418 (or a variant thereof), and an LCDR3 comprising the amino acid sequence set forth in SEQ ID NO: 419 (or a variant thereof); (z) a HCVR that comprises: an HCDR1 comprising the amino acid sequence set forth in SEQ ID NO: 422 (or a variant thereof), an HCDR2 comprising the amino acid sequence set forth in SEQ ID NO: 423 (or a variant thereof), and an HCDR3 comprising the amino acid sequence set forth in SEQ ID NO: 424 (or a variant thereof); and a LCVR that comprises: an LCDR1 comprising the amino acid sequence set forth in SEQ ID NO: 427 (or a variant thereof), an LCDR2 comprising the amino acid sequence set forth in SEQ ID NO: 428 (or a variant thereof), and an LCDR3 comprising the amino acid sequence set forth in SEQ ID NO: 429 (or a variant thereof); (aa) a HCVR that comprises: an HCDR1 comprising the amino acid sequence set forth in SEQ ID NO: 432 (or a variant thereof), an HCDR2 comprising the amino acid sequence set forth in SEQ ID NO: 433 (or a variant thereof), and an HCDR3 comprising the amino acid sequence set forth in SEQ ID NO: 434 (or a variant thereof); and a LCVR that comprises: an LCDR1 comprising the amino acid sequence set forth in SEQ ID NO: 437 (or a variant thereof), an LCDR2 comprising the amino acid sequence set forth in SEQ ID NO: 438 (or a variant thereof), and an LCDR3 comprising the amino acid sequence set forth in SEQ ID NO: 439 (or a variant thereof); (ab) a HCVR that comprises: an HCDR1 comprising the amino acid sequence set forth in SEQ ID NO: 442 (or a variant thereof), an HCDR2 comprising the amino acid sequence set forth in SEQ ID NO: 443 (or a variant thereof), and an HCDR3 comprising the amino acid sequence set forth in SEQ ID NO: 444 (or a variant thereof); and a LCVR that comprises: an LCDR1 comprising the amino acid sequence set forth in SEQ ID NO: 447 (or a variant thereof), an LCDR2 comprising the amino acid sequence set forth in SEQ ID NO: 448 (or a variant thereof), and an LCDR3 comprising the amino acid sequence set forth in SEQ ID NO: 449 (or a variant thereof); (ac) a HCVR that comprises: an HCDR1 comprising the amino acid sequence set forth in SEQ ID NO: 452 (or a variant thereof), an HCDR2 comprising the amino acid sequence set forth in SEQ ID NO: 453 (or a variant thereof), and an HCDR3 comprising the amino acid sequence set forth in SEQ ID NO: 454 (or a variant thereof); and a LCVR that comprises: an LCDR1 comprising the amino acid sequence set forth in SEQ ID NO: 457 (or a variant thereof), an LCDR2 comprising the amino acid sequence set forth in SEQ ID NO: 458 (or a variant thereof), and an LCDR3 comprising the amino acid sequence set forth in SEQ ID NO: 459 (or a variant thereof); (ad) a HCVR that comprises: an HCDR1 comprising the amino acid sequence set forth in SEQ ID NO: 462 (or a variant thereof), an HCDR2 comprising the amino acid sequence set forth in SEQ ID NO: 463 (or a variant thereof), and an HCDR3 comprising the amino acid sequence set forth in SEQ ID NO: 464 (or a variant thereof); and a LCVR that comprises: an LCDR1 comprising the amino acid sequence set forth in SEQ ID NO: 467 (or a variant thereof), an LCDR2 comprising the amino acid sequence set forth in SEQ ID NO: 468 (or a variant thereof), and an LCDR3 comprising the amino acid sequence set forth in SEQ ID NO: 469 (or a variant thereof); (ae) a HCVR that comprises: an HCDR1 comprising the amino acid sequence set forth in SEQ ID NO: 472 (or a variant thereof), an HCDR2 comprising the amino acid sequence set forth in SEQ ID NO: 473 (or a variant thereof), and an HCDR3 comprising the amino acid sequence set forth in SEQ ID NO: 474 (or a variant thereof); and a LCVR that comprises: an LCDR1 comprising the amino acid sequence set forth in SEQ ID NO: 477 (or a variant thereof), an LCDR2 comprising the amino acid sequence set forth in SEQ ID NO: 478 (or a variant thereof), and an LCDR3 comprising the amino acid sequence set forth in SEQ ID NO: 479 (or a variant thereof); and/or (af) a HCVR that comprises: an HCDR1 comprising the amino acid sequence set forth in SEQ ID NO: 482 (or a variant thereof), an HCDR2 comprising the amino acid sequence set forth in SEQ ID NO: 483 (or a variant thereof), and an HCDR3 comprising the amino acid sequence set forth in SEQ ID NO: 484 (or a variant thereof); and a LCVR that comprises: an LCDR1 comprising the amino acid sequence set forth in SEQ ID NO: 487 (or a variant thereof), an LCDR2 comprising the amino acid sequence set forth in SEQ ID NO: 488 (or a variant thereof), and an LCDR3 comprising the amino acid sequence set forth in SEQ ID NO: 489 (or a variant thereof).

[0010] In some such multidomain therapeutic proteins, the anti-TfR antigen binding protein comprises: (a) a HCVR that comprises: an HCDR1 comprising the amino acid sequence set forth in SEQ ID NO: 392 (or a variant thereof), an HCDR2 comprising the amino acid sequence set forth in SEQ ID NO: 393 (or a variant thereof), and an HCDR3 comprising the amino acid sequence set forth in SEQ ID NO: 394 (or a variant thereof); and a LCVR that comprises: an LCDR1 comprising the amino acid sequence set forth in SEQ ID NO: 397 (or a variant thereof), an LCDR2 comprising the amino acid sequence set forth in SEQ ID NO: 398 (or a variant thereof), and an LCDR3 comprising the amino acid sequence set forth in SEQ ID NO: 399 (or a variant thereof); or (b) a HCVR that comprises: an HCDR1 comprising the amino acid sequence set forth in SEQ ID NO: 412 (or a variant thereof), an HCDR2 comprising the amino acid sequence set forth in SEQ ID NO: 413 (or a variant thereof), and an HCDR3 comprising the amino acid sequence set forth in SEQ ID NO: 414 (or a variant thereof); and a LCVR that comprises: an LCDR1 comprising the amino acid sequence set forth in SEQ ID NO: 417 (or a variant thereof), an LCDR2 comprising the amino acid sequence set forth in SEQ ID NO: 418 (or a variant thereof), and an LCDR3 comprising the amino acid sequence set forth in SEQ ID NO: 419 (or a variant thereof). In some such multidomain therapeutic proteins, the anti-TfR antigen binding protein comprises: a HCVR that comprises: an HCDR1 comprising the amino acid sequence set forth in SEQ ID NO: 392 (or a variant thereof), an HCDR2 comprising the amino acid sequence set forth in SEQ ID NO: 393 (or a variant thereof), and an HCDR3 comprising the amino acid sequence set forth in SEQ ID NO: 394 (or a variant thereof); and a LCVR that comprises: an LCDR1 comprising the amino acid sequence set forth in SEQ ID NO: 397 (or a variant thereof), an LCDR2 comprising the amino acid sequence set forth in SEQ ID NO: 398 (or a variant thereof), and an LCDR3 comprising the amino acid sequence set forth in SEQ ID NO: 399 (or a variant thereof).

[0011] In some such multidomain therapeutic proteins, the anti-TfR antigen binding protein comprises: (i) a HCVR that comprises the amino acid sequence set forth in SEQ ID NO: 171 (or a variant thereof); and a LCVR that comprises the amino acid sequence set forth in SEQ ID NO: 176 (or a variant thereof); (ii) a HCVR that comprises the amino acid sequence set forth in SEQ ID NO: 181 (or a variant thereof); and a LCVR that comprises the amino acid sequence set forth in SEQ ID NO: 186 (or a variant thereof); (iii) a HCVR that comprises the amino acid sequence set forth in SEQ ID NO: 191 (or a variant thereof); and a LCVR that comprises the amino acid sequence set forth in SEQ ID NO: 196 (or a variant thereof); (iv) a HCVR that comprises the amino acid sequence set forth in SEQ ID NO: 201 (or a variant thereof); and a LCVR that comprises the amino acid sequence set forth in SEQ ID NO: 206 (or a variant thereof); (v) a HCVR that comprises the amino acid sequence set forth in SEQ ID NO: 211 (or a variant thereof); and a LCVR that comprises the amino acid sequence set forth in SEQ ID NO: 216 (or a variant thereof); (vi) a HCVR that comprises the amino acid sequence set forth in SEQ ID NO: 221 (or a variant thereof); and a LCVR that comprises the amino acid sequence set forth in SEQ ID NO: 226 (or a variant thereof); (vii) a HCVR that comprises the amino acid sequence set forth in SEQ ID NO: 231 (or a variant thereof); and a LCVR that comprises the amino acid sequence set forth in SEQ ID NO: 236 (or a variant thereof); (viii) a HCVR that comprises the amino acid sequence set forth in SEQ ID NO: 241 (or a variant thereof); and a LCVR that comprises the amino acid sequence set forth in SEQ ID NO: 246 (or a variant thereof); (ix) a HCVR that comprises the amino acid sequence set forth in SEQ ID NO: 251 (or a variant thereof); and a LCVR that comprises the amino acid sequence set forth in SEQ ID NO: 256 (or a variant thereof); (x) a HCVR that comprises the amino acid sequence set forth in SEQ ID NO: 261 (or a variant thereof); and a LCVR that comprises the amino acid sequence set forth in SEQ ID NO: 266 (or a variant thereof); (xi) a HCVR that comprises the amino acid sequence set forth in SEQ ID NO: 271 (or a variant thereof); and a LCVR that comprises the amino acid sequence set forth in SEQ ID NO: 276 (or a variant thereof); (xii) a HCVR that comprises the amino acid sequence set forth in SEQ ID NO: 281 (or a variant thereof); and a LCVR that comprises the amino acid sequence set forth in SEQ ID NO: 286 (or a variant thereof); (xiii) a HCVR that comprises the amino acid sequence set forth in SEQ ID NO: 291 (or a variant thereof); and a LCVR that comprises the amino acid sequence set forth in SEQ ID NO: 296 (or a variant thereof); (xiv) a HCVR that comprises the amino acid sequence set forth in SEQ ID NO: 301 (or a variant thereof); and a LCVR that comprises the amino acid sequence set forth in SEQ ID NO: 306 (or a variant thereof); (xv) a HCVR that comprises the amino acid sequence set forth in SEQ ID NO: 311 (or a variant thereof); and a LCVR that comprises the amino acid sequence set forth in SEQ ID NO: 316 (or a variant thereof); (xvi) a HCVR that comprises the amino acid sequence set forth in SEQ ID NO: 321 (or a variant thereof); and a LCVR that comprises the amino acid sequence set forth in SEQ ID NO: 326 (or a variant thereof); (xvii) a HCVR that comprises the amino acid sequence set forth in SEQ ID NO: 331 (or a variant thereof); and a LCVR that comprises the amino acid sequence set forth in SEQ ID NO: 336 (or a variant thereof); (xviii) a HCVR that comprises the amino acid sequence set forth in SEQ ID NO: 341 (or a variant thereof); and a LCVR that comprises the amino acid sequence set forth in SEQ ID NO: 346 (or a variant thereof); (xix) a HCVR that comprises the amino acid sequence set forth in SEQ ID NO: 351 (or a variant thereof); and a LCVR that comprises the amino acid sequence set forth in SEQ ID NO: 356 (or a variant thereof); (xx) a HCVR that comprises the amino acid sequence set forth in SEQ ID NO: 361 (or a variant thereof); and a LCVR that comprises the amino acid sequence set forth in SEQ ID NO: 366 (or a variant thereof); (xxi) a HCVR that comprises the amino acid sequence set forth in SEQ ID NO: 371 (or a variant thereof); and a LCVR that comprises the amino acid sequence set forth in SEQ ID NO: 376 (or a variant thereof); (xxii) a HCVR that comprises the amino acid sequence set forth in SEQ ID NO: 381 (or a variant thereof); and a LCVR that comprises the amino acid sequence set forth in SEQ ID NO: 386 (or a variant thereof); (xxiii) a HCVR that comprises the amino acid sequence set forth in SEQ ID NO: 391 (or a variant thereof); and a LCVR that comprises the amino acid sequence set forth in SEQ ID NO: 396 (or a variant thereof); (xxiv) a HCVR that comprises the amino acid sequence set forth in SEQ ID NO: 401 (or a variant thereof); and a LCVR that comprises the amino acid sequence set forth in SEQ ID NO: 406 (or a variant thereof); (xxv) a HCVR that comprises the amino acid sequence set forth in SEQ ID NO: 411 (or a variant thereof); and a LCVR that comprises the amino acid sequence set forth in SEQ ID NO: 416 (or a variant thereof); (xxvi) a HCVR that comprises the amino acid sequence set forth in SEQ ID NO: 421 (or a variant thereof); and a LCVR that comprises the amino acid sequence set forth in SEQ ID NO: 426 (or a variant thereof); (xxvii) a HCVR that comprises the amino acid sequence set forth in SEQ ID NO: 431 (or a variant thereof); and a LCVR that comprises the amino acid sequence set forth in SEQ ID NO: 436 (or a variant thereof); (xxviii) a HCVR that comprises the amino acid sequence set forth in SEQ ID NO: 441 (or a variant thereof); and a LCVR that comprises the amino acid sequence set forth in SEQ ID NO: 446 (or a variant thereof); (xxix) a HCVR that comprises the amino acid sequence set forth in SEQ ID NO: 451 (or a variant thereof); and a LCVR that comprises the amino acid sequence set forth in SEQ ID NO: 456 (or a variant thereof); (xxx) a HCVR that comprises the amino acid sequence set forth in SEQ ID NO: 461 (or a variant thereof); and a LCVR that comprises the amino acid sequence set forth in SEQ ID NO: 466 (or a variant thereof); (xxxi) a HCVR that comprises the amino acid sequence set forth in SEQ ID NO: 471 (or a variant thereof); and a LCVR that comprises the amino acid sequence set forth in SEQ ID NO: 476 (or a variant thereof); and/or (xxxii) a HCVR that comprises the amino acid sequence set forth in SEQ ID NO: 481 (or a variant thereof); and a LCVR that comprises the amino acid sequence set forth in SEQ ID NO: 486 (or a variant thereof).

[0012] In some such multidomain therapeutic proteins, the anti-TfR antigen binding protein comprises: (i) a HCVR that comprises the amino acid sequence set forth in SEQ ID NO: 391 (or a variant thereof); and a LCVR that comprises the amino acid sequence set forth in SEQ ID NO: 396 (or a variant thereof); or (ii) a HCVR that comprises the amino acid sequence set forth in SEQ ID NO: 411 (or a variant thereof); and a LCVR that comprises the amino acid sequence set forth in SEQ ID NO: 416 (or a variant thereof). In some such multidomain therapeutic proteins, the anti-TfR antigen binding protein comprises: a HCVR that comprises the amino acid sequence set forth in SEQ ID NO: 391 (or a variant thereof); and a LCVR that comprises the amino acid sequence set forth in SEQ ID NO: 396 (or a variant thereof).

[0013] In some such multidomain therapeutic proteins, the TfR-binding delivery domain comprises an anti-TfR antibody, antibody fragment, or single-chain variable fragment (scFv). In some such multidomain therapeutic proteins, the TfR-binding delivery domain is the single-chain variable fragment (scFv), optionally wherein the multidomain therapeutic protein comprises domains arranged in the following orientation: N′-heavy chain variable region-light chain variable region-acid sphingomyelinase polypeptide-C′ or N′-light chain variable region-heavy chain variable region-acid sphingomyelinase polypeptide-C′, optionally wherein the scFv and acid sphingomyelinase polypeptide are connected by a peptide linker, and optionally wherein the peptide linker which is -(GGGGS)ₘ-(SEQ ID NO: 537); wherein m is 1, 2, 3, 4, 5, 6, 7, 8, 9, or 10, optionally wherein the scFv variable regions are connected by a peptide linker, and optionally wherein the peptide linker which is -(GGGGS)ₘ-(SEQ ID NO: 537); wherein m is 1, 2, 3, 4, 5, 6, 7, 8, 9, or 10. In some such multidomain therapeutic proteins, the multidomain therapeutic protein comprises a heavy chain variable region (V_{H}) and a light chain variable region (V_{L}), and an acid sphingomyelinase polypeptide, wherein the V_{H}, V_{L} and acid sphingomyelinase polypeptide are arranged as follows: (i) V_{L}-V_{H}-acid sphingomyelinase polypeptide; (ii) V_{H}-V_{L}-acid sphingomyelinase polypeptide; (iii) V_{L}-[(GGGGS)₃(SEQ ID NO: 616)]-V_{H}-[(GGGGS)₂(SEQ ID NO: 617)]-acid sphingomyelinase polypeptide; or (iv) V_{H}-[(GGGGS)₃(SEQ ID NO: 616)]-V_{L}-[(GGGGS)₂(SEQ ID NO: 617)]-acid sphingomyelinase polypeptide. In some such multidomain therapeutic proteins, the scFv comprises, consists essentially of, or consists of the sequence set forth in any one of SEQ ID NOS: 494, 503, 505, and 508, optionally wherein the scFv comprises, consists essentially of, or consists of the sequence set forth in SEQ ID NO: 505 or 508, optionally wherein the scFv comprises, consists essentially of, or consists of the sequence set forth in SEQ ID NO: 508. In some such multidomain therapeutic proteins, the multidomain therapeutic protein comprises, consists essentially of, or consists of the sequence set forth in SEQ ID NO: 737 or 739. In some such multidomain therapeutic proteins, the multidomain therapeutic protein comprises, consists essentially of, or consists of the sequence set forth in SEQ ID NO: 837, 839, 841, 737 or 739. In some such multidomain therapeutic proteins, the multidomain therapeutic protein comprises, consists essentially of, or consists of the sequence set forth in SEQ ID NO: 837, 839, or 841. In some such multidomain therapeutic proteins, the multidomain therapeutic protein comprises, consists essentially of, or consists of the sequence set forth in SEQ ID NO: 837 or 839. In some such multidomain therapeutic proteins, the multidomain therapeutic protein comprises, consists essentially of, or consists of the sequence set forth in SEQ ID NO: 837. In some such multidomain therapeutic proteins, the multidomain therapeutic protein comprises, consists essentially of, or consists of the sequence set forth in SEQ ID NO: 839. In some such multidomain therapeutic proteins, the multidomain therapeutic protein comprises, consists essentially of, or consists of the sequence set forth in SEQ ID NO: 841. In some such multidomain therapeutic proteins, the scFv comprises, consists essentially of, or consists of the sequence set forth in SEQ ID NO: 813.

[0014] In some such multidomain therapeutic proteins, the TfR-binding delivery domain is Fab protein comprising one complete light chain, a heavy chain variable region, and a heavy chain constant region CH1 domain, optionally the C-terminal end of the CH1 domain is linked to the N-terminal end of the light chain or the C-terminal end of the light chain is linked to the N-terminal end of the heavy chain variable region, optionally wherein the Fab protein comprises the amino acid sequences set forth in SEQ ID NOS: 584 and 635 (or variants thereof) or comprises the amino acid sequences set forth in SEQ ID NOS: 588 and 636 (or variants thereof), and optionally wherein the C-terminal end of the CH1 domain is linked to the N-terminal end of the acid sphingomyelinase polypeptide, or optionally wherein the C-terminal end of the light chain is linked to the N-terminal end of the acid sphingomyelinase polypeptide. In some such multidomain therapeutic proteins, the Fab protein comprises the amino acid sequences set forth in SEQ ID NOS: 584 and 635 (or variants thereof), optionally wherein the Fab protein comprises, consists essentially of, or consists of the sequence set forth in SEQ ID NO: 815 or 817. In some such multidomain therapeutic proteins, the multidomain therapeutic protein comprises, consists essentially of, or consists of the sequence set forth in SEQ ID NO: 833 or 835. In some such multidomain therapeutic proteins, the multidomain therapeutic protein comprises, consists essentially of, or consists of the sequence set forth in SEQ ID NO: 833. In some such multidomain therapeutic proteins, the multidomain therapeutic protein comprises, consists essentially of, or consists of the sequence set forth in SEQ ID NO: 835.

[0015] In some such multidomain therapeutic proteins, the TfR-binding delivery domain is an antigen-binding protein that binds to one or more epitopes of hTfR selected from: (a) an epitope comprising the sequence LLNE (SEQ ID NO: 752) and/or an epitope comprising the sequence TYKEL (SEQ ID NO: 706); (b) an epitope comprising the sequence DSTDFTGT (SEQ ID NO: 753) and/or an epitope comprising the sequence VKHPVTGQF (SEQ ID NO: 754) and/or an epitope comprising the sequence IERIPEL (SEQ ID NO: 755); (c) an epitope comprising the sequence LNENSYVPREAGSQKDEN (SEQ ID NO: 756); (d) an epitope comprising the sequence FEDL (SEQ ID NO: 718); (e) an epitope comprising the sequence IVDKNGRL (SEQ ID NO: 757); (f) an epitope comprising the sequence IVDKNGRLVY (SEQ ID NO: 758); (g) an epitope comprising the sequence DQTKF (SEQ ID NO: 759); (h) an epitope comprising the sequence LVENPGGY (SEQ ID NO: 760) and/or an epitope comprising the sequence PIVNAELSF (SEQ ID NO: 761) and/or an epitope comprising the sequence PYLGTTMDT (SEQ ID NO: 762); (i) an epitope comprising the sequence LLNENSYVPREAGSQKDENLAL (SEQ ID NO: 704) and/or an epitope comprising the sequence IYMDQTKFPIVNAEL (SEQ ID NO: 705) and/or an epitope comprising the sequence TYKEL (SEQ ID NO: 706); (j) an epitope comprising the sequence KRKLSEKLDSTDFTGTIKL (SEQ ID NO: 707) and/or an epitope comprising the sequence YTLIEKTMQNVKHPVTGQFL (SEQ ID NO: 708) and/or an epitope comprising the sequence LIERIPELNKVARAAAE (SEQ ID NO: 709); (k) an epitope comprising the sequence LNENSYVPREAGSQKDENL (SEQ ID NO: 710); (1) an epitope comprising the sequence GTKKDFEDL (SEQ ID NO: 711); (m) an epitope comprising the sequence SVIIVDKNGRLVYLVENPGGYVAYSK (SEQ ID NO: 712); (n) an epitope comprising the sequence LLNENSYVPREAGSQKDEN (SEQ ID NO: 713) and/or an epitope comprising the sequence DQTKFPIVNAEL (SEQ ID NO: 714) and/or an epitope comprising the sequence TYKELIERIPELNK (SEQ ID NO: 715); (o) an epitope comprising the sequence LLNENSYVPREAGSQKDEN (SEQ ID NO: 713) and/or an epitope comprising the sequence TYKELIERIPELNK (SEQ ID NO: 715); (p) an epitope comprising the sequence SVIIVDKNGRLVYLVENPGGYVAY (SEQ ID NO: 716); (q) an epitope comprising the sequence IYMDQTKFPIVNAEL (SEQ ID NO: 705) and/or an epitope comprising the sequence FGNMEGDCPSDWKTDSTCRM (SEQ ID NO: 717); (r) an epitope comprising the sequence LLNENSYVPREAGSQKDENLAL (SEQ ID NO: 704) and/or an epitope comprising the sequence LVENPGGYVAYSKAATVTGKL (SEQ ID NO: 719) and/or an epitope comprising the sequence IYMDQTKFPIVNAELSF (SEQ ID NO: 720) and/or an epitope comprising the sequence ISRAAAEKL (SEQ ID NO: 721) and/or an epitope comprising the sequence VTSESKNVKLTVSNVLKE (SEQ ID NO: 722) and/or an epitope comprising the sequence FCEDTDYPYLGTTMDT (SEQ ID NO: 723); (s) an epitope comprised within or overlapping with the sequence LLNENSYVPREAGSQKDENLAL (SEQ ID NO: 704) and/or an epitope comprised within or overlapping with the sequence IYMDQTKFPIVNAEL (SEQ ID NO: 705) and/or an epitope comprised within or overlapping with the sequence TYKEL (SEQ ID NO: 706); (t) an epitope comprised within or overlapping with the sequence KRKLSEKLDSTDFTGTIKL (SEQ ID NO: 707) and/or an epitope comprised within or overlapping with the sequence YTLIEKTMQNVKHPVTGQFL (SEQ ID NO: 708) and/or an epitope comprised within or overlapping with the sequence LIERIPELNKVARAAAE (SEQ ID NO: 709); (u) an epitope comprised within or overlapping with the sequence LNENSYVPREAGSQKDENL (SEQ ID NO: 710); (v) an epitope comprised within or overlapping with the sequence GTKKDFEDL (SEQ ID NO: 711); (w) an epitope comprised within or overlapping with the sequence SVIIVDKNGRLVYLVENPGGYVAYSK (SEQ ID NO: 712); (x) an epitope comprised within or overlapping with the sequence LLNENSYVPREAGSQKDEN (SEQ ID NO: 713) and/or an epitope comprised within or overlapping with the sequence DQTKFPIVNAEL (SEQ ID NO: 714) and/or an epitope comprised within or overlapping with the sequence TYKELIERIPELNK (SEQ ID NO: 715); (y) an epitope comprised within or overlapping with the sequence LLNENSYVPREAGSQKDEN (SEQ ID NO: 713) and/or an epitope comprised within or overlapping with the sequence TYKELIERIPELNK (SEQ ID NO: 715); (z) an epitope comprised within or overlapping with the sequence SVIIVDKNGRLVYLVENPGGYVAY (SEQ ID NO: 716); (aa) an epitope comprised within or overlapping with the sequence IYMDQTKFPIVNAEL (SEQ ID NO: 705) and/or an epitope comprised within or overlapping with the sequence FGNMEGDCPSDWKTDSTCRM (SEQ ID NO: 717); and (ab) an epitope comprised within or overlapping with the sequence LLNENSYVPREAGSQKDENLAL (SEQ ID NO: 704) and/or an epitope comprised within or overlapping with the sequence LVENPGGYVAYSKAATVTGKL (SEQ ID NO: 719) and/or an epitope comprised within or overlapping with the sequence IYMDQTKFPIVNAELSF (SEQ ID NO: 720) and/or an epitope comprised within or overlapping with the sequence ISRAAAEKL (SEQ ID NO: 721) and/or an epitope comprised within or overlapping with the sequence VTSESKNVKLTVSNVLKE (SEQ ID NO: 722) and/or an epitope comprised within or overlapping with the sequence FCEDTDYPYLGTTMDT (SEQ ID NO: 723).

[0016] In some such multidomain therapeutic proteins, the TfR-binding delivery domain comprises an antibody or antigen-binding fragment thereof that binds to one or more epitopes of hTfR selected from: (a) an epitope consisting of the sequence LLNE (SEQ ID NO: 752) and/or an epitope consisting of the sequence TYKEL (SEQ ID NO: 706); (b) an epitope consisting of the sequence DSTDFTGT (SEQ ID NO: 753) and/or an epitope consisting of the sequence VKHPVTGQF (SEQ ID NO: 754) and/or an epitope consisting of the sequence IERIPEL (SEQ ID NO: 755); (c) an epitope consisting of the sequence LNENSYVPREAGSQKDEN (SEQ ID NO: 756); (d) an epitope consisting of the sequence FEDL (SEQ ID NO: 718); (e) an epitope consisting of the sequence IVDKNGRL (SEQ ID NO: 757); (f) an epitope consisting of the sequence IVDKNGRLVY (SEQ ID NO: 758); (g) an epitope consisting of the sequence DQTKF (SEQ ID NO: 759); (h) an epitope consisting of the sequence LVENPGGY (SEQ ID NO: 760) and/or an epitope consisting of the sequence PIVNAELSF (SEQ ID NO: 761) and/or an epitope consisting of the sequence PYLGTTMDT (SEQ ID NO: 762); (i) an epitope consisting of the sequence LLNENSYVPREAGSQKDENLAL (SEQ ID NO: 704) and/or an epitope consisting of the sequence IYMDQTKFPIVNAEL (SEQ ID NO: 705) and/or an epitope consisting of the sequence TYKEL (SEQ ID NO: 706); (j) an epitope consisting of the sequence KRKLSEKLDSTDFTGTIKL (SEQ ID NO: 707) and/or an epitope consisting of the sequence YTLIEKTMQNVKHPVTGQFL (SEQ ID NO: 708) and/or an epitope consisting of the sequence LIERIPELNKVARAAAE (SEQ ID NO: 709); (k) an epitope consisting of the sequence LNENSYVPREAGSQKDENL (SEQ ID NO: 710); (1) an epitope consisting of the sequence GTKKDFEDL (SEQ ID NO: 711); (m) an epitope consisting of the sequence SVIIVDKNGRLVYLVENPGGYVAYSK (SEQ ID NO: 712); (n) an epitope consisting of the sequence LLNENSYVPREAGSQKDEN (SEQ ID NO: 713) and/or an epitope consisting of the sequence DQTKFPIVNAEL (SEQ ID NO: 714) and/or an epitope consisting of the sequence TYKELIERIPELNK (SEQ ID NO: 715); (o) an epitope consisting of the sequence LLNENSYVPREAGSQKDEN (SEQ ID NO: 713) and/or an epitope consisting of the sequence TYKELIERIPELNK (SEQ ID NO: 715); (p) an epitope consisting of the sequence SVIIVDKNGRLVYLVENPGGYVAY (SEQ ID NO: 716); (q) an epitope consisting of the sequence IYMDQTKFPIVNAEL (SEQ ID NO: 705) and/or an epitope consisting of the sequence FGNMEGDCPSDWKTDSTCRM (SEQ ID NO: 717); and (r) an epitope consisting of the sequence LLNENSYVPREAGSQKDENLAL (SEQ ID NO: 704) and/or an epitope consisting of the sequence LVENPGGYVAYSKAATVTGKL (SEQ ID NO: 719) and/or an epitope consisting of the sequence IYMDQTKFPIVNAELSF (SEQ ID NO: 720) and/or an epitope consisting of the sequence ISRAAAEKL (SEQ ID NO: 721) and/or an epitope consisting of the sequence VTSESKNVKLTVSNVLKE (SEQ ID NO: 722) and/or an epitope consisting of the sequence FCEDTDYPYLGTTMDT (SEQ ID NO: 723).

[0017] In another aspect, provided are compositions comprising a nucleic acid construct comprising a coding sequence for any of the above multidomain therapeutic proteins. In some such compositions, the coding sequence for the TfR-binding delivery domain is codon-optimized or CpG-depleted, the coding sequence for the acid sphingomyelinase polypeptide is codon-optimized or CpG-depleted, or the coding sequence for the multidomain therapeutic protein is codon-optimized or CpG-depleted. In some such compositions, the coding sequence for the TfR-binding delivery domain is codon-optimized and CpG-depleted, the coding sequence for the acid sphingomyelinase polypeptide is codon-optimized and CpG-depleted, or the coding sequence for the multidomain therapeutic protein is codon-optimized and CpG-depleted.

[0018] In some such compositions, the scFv coding sequence is at least 90%, at least 91%, at least 92%, at least 93%, at least 94%, at least 95%, at least 96%, at least 97%, at least 98%, or at least 99% identical to any one of SEQ ID NOS: 524-536 and encodes an scFv comprising any one of SEQ ID NOS: 494, 503, 505, or 508, optionally wherein the scFv coding sequence is at least 90%, at least 91%, at least 92%, at least 93%, at least 94%, at least 95%, at least 96%, at least 97%, at least 98%, or at least 99% identical to any one of SEQ ID NOS: 530-532 and encodes an scFv comprising SEQ ID NO: 508, or optionally wherein the scFv coding sequence is at least 90%, at least 91%, at least 92%, at least 93%, at least 94%, at least 95%, at least 96%, at least 97%, at least 98%, or at least 99% identical to any one of SEQ ID NOS: 527-529 and encodes an scFv comprising SEQ ID NO: 505, optionally wherein the scFv coding sequence is at least 90%, at least 91%, at least 92%, at least 93%, at least 94%, at least 95%, at least 96%, at least 97%, at least 98%, or at least 99% identical to SEQ ID NO: 530 and encodes an scFv comprising SEQ ID NO: 508, optionally wherein the scFv coding sequence is at least 90%, at least 91%, at least 92%, at least 93%, at least 94%, at least 95%, at least 96%, at least 97%, at least 98%, or at least 99% identical to SEQ ID NO: 532 and encodes an scFv comprising SEQ ID NO: 508, or optionally wherein the scFv coding sequence is at least 90%, at least 91%, at least 92%, at least 93%, at least 94%, at least 95%, at least 96%, at least 97%, at least 98%, or at least 99% identical to SEQ ID NO: 527 and encodes an scFv comprising SEQ ID NO: 505. In some such compositions, the scFv coding sequence is at least 90%, at least 91%, at least 92%, at least 93%, at least 94%, at least 95%, at least 96%, at least 97%, at least 98%, or at least 99% identical to any one of SEQ ID NOS: 524-536, is codon-optimized and CpG-depleted, and encodes an scFv comprising any one of SEQ ID NOS: 494, 503, 505, or 508, optionally wherein the scFv coding sequence is at least 90%, at least 91%, at least 92%, at least 93%, at least 94%, at least 95%, at least 96%, at least 97%, at least 98%, or at least 99% identical to any one of SEQ ID NOS: 530-532, is codon-optimized and CpG-depleted, and encodes an scFv comprising SEQ ID NO: 508, or optionally wherein the scFv coding sequence is at least 90%, at least 91%, at least 92%, at least 93%, at least 94%, at least 95%, at least 96%, at least 97%, at least 98%, or at least 99% identical to any one of SEQ ID NOS: 527-529, is codon-optimized and CpG-depleted, and encodes an scFv comprising SEQ ID NO: 505, optionally wherein the scFv coding sequence is at least 90%, at least 91%, at least 92%, at least 93%, at least 94%, at least 95%, at least 96%, at least 97%, at least 98%, or at least 99% identical to SEQ ID NO: 530, the scFv coding sequence is codon-optimized and CpG-depleted, and encodes an scFv comprising SEQ ID NO: 508, optionally wherein the scFv coding sequence is at least 90%, at least 91%, at least 92%, at least 93%, at least 94%, at least 95%, at least 96%, at least 97%, at least 98%, or at least 99% identical to SEQ ID NO: 532, the scFv coding sequence is codon-optimized and CpG-depleted, and encodes an scFv comprising SEQ ID NO: 508, or optionally wherein the scFv coding sequence is at least 90%, at least 91%, at least 92%, at least 93%, at least 94%, at least 95%, at least 96%, at least 97%, at least 98%, or at least 99% identical to SEQ ID NO: 527, the scFv coding sequence is codon-optimized and CpG-depleted, and encodes an scFv comprising SEQ ID NO: 505. In some such compositions, the scFv coding sequence comprises, consists essentially of, or consists of the sequence set forth in any one of SEQ ID NOS: 524-536, optionally wherein the scFv coding sequence comprises, consists essentially of, or consists of the sequence set forth in any one of SEQ ID NOS: 530-532, or optionally wherein the scFv coding sequence comprises, consists essentially of, or consists of the sequence set forth in any one of SEQ ID NOS: 527-529, optionally wherein the scFv coding sequence comprises, consists essentially of, or consists of the sequence set forth in SEQ ID NO: 530, optionally wherein the scFv coding sequence comprises, consists essentially of, or consists of the sequence set forth in SEQ ID NO: 532, or optionally wherein the scFv coding sequence comprises, consists essentially of, or consists of the sequence set forth in SEQ ID NO: 527.

[0019] In some such compositions, the nucleic acid construct comprises a splice acceptor upstream of the coding sequence for the multidomain therapeutic protein, wherein the nucleic acid construct comprises a polyadenylation signal or sequence downstream of the coding sequence for the multidomain therapeutic protein, or wherein the nucleic acid construct comprises a splice acceptor upstream of the coding sequence for the multidomain therapeutic protein, and the nucleic acid construct comprises a polyadenylation signal or sequence downstream of the coding sequence for the multidomain therapeutic protein. In some such compositions, the nucleic acid construct does not comprise a homology arm. In some such compositions, the nucleic acid construct comprises from 5′ to 3′: a splice acceptor, the coding sequence for the multidomain therapeutic protein, and a polyadenylation signal or sequence, wherein the nucleic acid construct does not comprise a promoter that drives the expression of the multidomain therapeutic protein, and wherein the nucleic acid construct does not comprise a homology arm. In some such compositions, the nucleic acid construct comprises homology arms. In some such compositions, the nucleic acid construct does not comprise a promoter that drives the expression of the multidomain therapeutic protein. In some such compositions, the coding sequence for the multidomain therapeutic protein is operably linked to a promoter, optionally wherein the promoter is a liver-specific promoter.

[0020] In some such compositions, the nucleic acid construct is in a nucleic acid vector or a lipid nanoparticle. In some such compositions, the nucleic acid construct is in the nucleic acid vector, optionally wherein the nucleic acid vector is a viral vector. In some such compositions, the nucleic acid vector is an adeno-associated viral (AAV) vector, optionally wherein the nucleic acid construct is flanked by inverted terminal repeats (ITRs) on each end, optionally wherein the ITR on at least one end comprises, consists essentially of, or consists of SEQ ID NO: 160, and optionally wherein the ITR on each end comprises, consists essentially of, or consists of SEQ ID NO: 160. In some such compositions, the AAV vector is a single-stranded AAV (ssAAV) vector. In some such compositions, the AAV vector is a recombinant AAV8 (rAAV8) vector, optionally wherein the AAV vector is a single-stranded rAAV8 vector.

[0021] In some such compositions, the composition is in combination with a nuclease agent that targets a nuclease target site in a target genomic locus. In some such compositions, the target genomic locus is an albumin gene, optionally wherein the albumin gene is a human albumin gene. In some such compositions, the nuclease target site is in intron 1 of the albumin gene. In some such compositions, the nuclease agent comprises: (a) a zinc finger nuclease (ZFN); (b) a transcription activator-like effector nuclease (TALEN); or (c) (i) a Cas protein or a nucleic acid encoding the Cas protein; and (ii) a guide RNA or one or more DNAs encoding the guide RNA, wherein the guide RNA comprises a DNA-targeting segment that targets a guide RNA target sequence, and wherein the guide RNA binds to the Cas protein and targets the Cas protein to the guide RNA target sequence. In some such compositions, the nuclease agent comprises: (a) a Cas protein or a nucleic acid encoding the Cas protein; and (b) a guide RNA or one or more DNAs encoding the guide RNA, wherein the guide RNA comprises a DNA-targeting segment that targets a guide RNA target sequence, and wherein the guide RNA binds to the Cas protein and targets the Cas protein to the guide RNA target sequence.

[0022] In some such compositions, the guide RNA target sequence is in intron 1 of an albumin gene. In some such compositions, the DNA-targeting segment comprises any one of SEQ ID NOS: 30-61, optionally wherein the DNA-targeting segment comprises any one of SEQ ID NOS: 36, 30, 33, and 41, or wherein the DNA-targeting segment consists of any one of SEQ ID NOS: 30-61, optionally wherein the DNA-targeting segment consists of any one of SEQ ID NOS: 36, 30, 33, and 41. In some such compositions, the guide RNA comprises any one of SEQ ID NOS: 62-125, optionally wherein the guide RNA comprises any one of SEQ ID NOS: 68, 100, 62, 94, 65, 97, 73, and 105. In some such compositions, the DNA-targeting segment comprises or consists of SEQ ID NO: 36. In some such compositions, the guide RNA comprises SEQ ID NO: 68 or 100. In some such compositions, the composition comprises the guide RNA in the form of RNA. In some such compositions, the guide RNA comprises at least one modification. In some such compositions, the at least one modification comprises: (i) phosphorothioate bonds between the first four nucleotides at the 5′ end of the guide RNA; (ii) phosphorothioate bonds between the last four nucleotides at the 3′ end of the guide RNA; (iii) 2′-O-methyl-modified nucleotides at the first three nucleotides at the 5′ end of the guide RNA; and (iv) 2′-O-methyl-modified nucleotides at the last three nucleotides at the 3′ end of the guide RNA. In some such compositions, the composition comprises the guide RNA in the form of RNA, the guide RNA comprises SEQ ID NO: 100, and the guide RNA comprises: (i) phosphorothioate bonds between the first four nucleotides at the 5′ end of the guide RNA; (ii) phosphorothioate bonds between the last four nucleotides at the 3′ end of the guide RNA; (iii) 2′-O-methyl-modified nucleotides at the first three nucleotides at the 5′ end of the guide RNA; and (iv) 2′-O-methyl-modified nucleotides at the last three nucleotides at the 3′ end of the guide RNA.

[0023] In some such compositions, the Cas protein is a Cas9 protein, optionally wherein the Cas protein is derived from a Streptococcus pyogenes Cas9 protein. In some such compositions, the Cas protein comprises the sequence set forth in SEQ ID NO: 11. In some such compositions, the composition comprises the nucleic acid encoding the Cas protein, wherein the nucleic acid comprises an mRNA encoding the Cas protein. In some such compositions, the mRNA encoding the Cas protein comprises at least one modification. In some such compositions, the mRNA encoding the Cas protein is fully substituted with N1-methyl-pseudouridine. In some such compositions, the mRNA encoding the Cas protein comprises the sequence set forth in SEQ ID NO: 1 or 2. In some such compositions, the composition comprises the nucleic acid encoding the Cas protein, wherein the nucleic acid comprises an mRNA encoding the Cas protein, the mRNA encoding the Cas protein comprises the sequence set forth in SEQ ID NO: 1 or 2, and the mRNA encoding the Cas protein is fully substituted with N1-methyl-pseudouridine, comprises a 5′ cap, and comprises a poly(A) tail.

[0024] In some such compositions, the composition comprises the guide RNA in the form of RNA, and the guide RNA comprises SEQ ID NO: 68 or 100, and wherein the composition comprises administering the nucleic acid encoding the Cas protein, wherein the nucleic acid comprises an mRNA encoding the Cas protein, and the mRNA encoding the Cas protein comprises the sequence set forth in SEQ ID NO: 1 or 2. In some such compositions, the composition comprises the guide RNA in the form of RNA, the guide RNA comprises SEQ ID NO: 100, and the guide RNA comprises: (i) phosphorothioate bonds between the first four nucleotides at the 5′ end of the guide RNA; (ii) phosphorothioate bonds between the last four nucleotides at the 3′ end of the guide RNA; (iii) 2′-O-methyl-modified nucleotides at the first three nucleotides at the 5′ end of the guide RNA; and (iv) 2′-O-methyl-modified nucleotides at the last three nucleotides at the 3′ end of the guide RNA, and wherein the composition the nucleic acid encoding the Cas protein, wherein the nucleic acid comprises an mRNA encoding the Cas protein, the mRNA encoding the Cas protein comprises the sequence set forth in SEQ ID NO: 1 or 2, and the mRNA encoding the Cas protein is fully substituted with N1-methyl-pseudouridine, comprises a 5′ cap, and comprises a poly(A) tail.

[0025] In some such compositions, the Cas protein or the nucleic acid encoding the Cas protein and the guide RNA or the one or more DNAs encoding the guide RNA are associated with a lipid nanoparticle. In some such compositions, the lipid nanoparticle comprises a cationic lipid, a neutral lipid, a helper lipid, and a stealth lipid. In some such compositions, the cationic lipid is Lipid A ((9Z,12Z)-3-((4,4-bis(octyloxy)butanoyl)oxy)-2-((((3-(diethylamino)propoxy)carbonyl)oxy)methyl)propyl octadeca-9,12-dienoate), and/or wherein the neutral lipid is distearoylphosphatidylcholine or 1,2-distearoyl-sn-glycero-3-phosphocholine (DSPC), and/or wherein the helper lipid is cholesterol, and/or wherein the stealth lipid is 1,2-dimyristoyl-rac-glycero-3-methoxypolyethylene glycol-2000. In some such compositions, the cationic lipid is Lipid A, the neutral lipid is DSPC, the helper lipid is cholesterol, and the stealth lipid is PEG2k-DMG. In some such compositions, the lipid nanoparticle comprises four lipids at the following molar ratios: about 50 mol % Lipid A, about 9 mol % DSPC, about 38 mol % cholesterol, and about 3 mol % PEG2k-DMG.

[0026] In another aspect, provided are cells comprising any of the above multidomain therapeutic proteins or compositions. In some such cells, the nucleic acid construct or the coding sequence for the multidomain therapeutic protein is integrated into a target genomic locus, and wherein the multidomain therapeutic protein is expressed from the target genomic locus, or wherein the nucleic acid construct or the coding sequence for the multidomain therapeutic protein is integrated into intron 1 of an endogenous albumin locus, and wherein the multidomain therapeutic protein is expressed from the endogenous albumin locus. In some such cells, the cell is a liver cell or a hepatocyte. In some such cells, the cell is a human cell.

[0027] In another aspect, provided are methods comprising administering any of the above multidomain therapeutic proteins to a cell or a population of cells. In another aspect, provided are methods of inserting a nucleic acid encoding a multidomain therapeutic protein comprising a TfR-binding delivery domain fused to an acid sphingomyelinase polypeptide into a target genomic locus in a cell or a population of cells, comprising administering to the cell or the population of cells any of the above compositions, wherein the nuclease agent cleaves the nuclease target site in the target genomic locus, and the nucleic acid construct or the nucleic acid encoding the multidomain therapeutic protein is inserted into the target genomic locus. In another aspect, provided are methods of expressing a multidomain therapeutic protein comprising a TfR-binding delivery domain fused to an acid sphingomyelinase polypeptide in a cell or a population of cells, comprising administering to the cell or the population of cells any of the above compositions, wherein the coding sequence for the multidomain therapeutic protein is operably linked to a promoter in the nucleic acid construct and is expressed in the cell or population of cells. In another aspect, provided are methods of expressing a multidomain therapeutic protein comprising a TfR-binding delivery domain fused to an acid sphingomyelinase polypeptide from a target genomic locus in a cell or a population of cells, comprising administering to the cell or the population of cells any of the above compositions, optionally wherein the nucleic acid construct is administered simultaneously with, prior to, or after the nuclease agent or the one or more nucleic acids encoding the nuclease agent, wherein the nuclease agent cleaves the nuclease target site in the target genomic locus, the nucleic acid construct or the coding sequence for the multidomain therapeutic protein is inserted into the target genomic locus to create a modified target genomic locus, and the multidomain therapeutic protein comprising the TfR-binding delivery domain fused to an acid sphingomyelinase polypeptide is expressed from the modified target genomic locus.

[0028] In some such methods, the cell is a liver cell or the population of cells is a population of liver cells, optionally wherein the cell is a hepatocyte or the population of cells is a population of hepatocytes. In some such methods, the cell is a human cell or the population of cells is a population of human cells. In some such methods, the cell is a neonatal cell or the population of cells is a population of neonatal cells. In some such methods, the cell is in vitro or ex vivo or the population of cells is in vitro or ex vivo. In some such methods, the cell is in vivo in a subject or the population of cells is in vivo in a subject.

[0029] In another aspect, provided are methods comprising administering any of the above multidomain therapeutic proteins to a subject. In another aspect, provided are methods of inserting a nucleic acid encoding a multidomain therapeutic protein comprising TfR-binding delivery domain fused to an acid sphingomyelinase polypeptide into a target genomic locus in a cell in a subject, comprising administering to the subject any of the above compositions, wherein the nuclease agent cleaves the nuclease target site in the target genomic locus, and the nucleic acid construct or the coding sequence for the multidomain therapeutic protein is inserted into the target genomic locus. In another aspect, provided are methods of expressing a multidomain therapeutic protein comprising a TfR-binding delivery domain fused to an acid sphingomyelinase polypeptide protein in a cell in a subject, comprising administering to the subject any of the above compositions, wherein the coding sequence for the multidomain therapeutic protein is operably linked to a promoter in the nucleic acid construct and is expressed in the cell. In another aspect, provided are methods of expressing a multidomain therapeutic protein comprising a TfR-binding delivery domain fused to an acid sphingomyelinase polypeptide protein from a target genomic locus in a cell in a subject, comprising administering to the subject any of the above compositions, optionally wherein the nucleic acid construct is administered simultaneously with, prior to, or after the nuclease agent or the one or more nucleic acids encoding the nuclease agent, wherein the nuclease agent cleaves the nuclease target site in the target genomic locus, the nucleic acid construct or the coding sequence for the multidomain therapeutic protein is inserted into the target genomic locus to create a modified target genomic locus, and the multidomain therapeutic protein comprising the TfR-binding delivery domain fused to an acid sphingomyelinase polypeptide is expressed from the modified target genomic locus.

[0030] In some such methods, the expressed multidomain therapeutic protein is delivered to and internalized by central nervous system tissue in the subject. In some such methods, the cell is a liver cell, optionally wherein the cell is a hepatocyte. In some such methods, the cell is a human cell. In some such methods, the cell is a neonatal cell.

[0031] In another aspect, provided are methods of treating an acid sphingomyelinase deficiency in a subject in need thereof, comprising administering to the subject any of the above multidomain therapeutic proteins. In another aspect, provided are methods of treating an acid sphingomyelinase deficiency in a subject in need thereof, comprising administering to the subject any of the above compositions, wherein the coding sequence for the multidomain therapeutic protein is operably linked to a promoter in the nucleic acid construct and is expressed in the subject. In another aspect, provided are methods of treating an acid sphingomyelinase deficiency in a subject in need thereof, comprising administering to the subject any of the above compositions, optionally wherein the nucleic acid construct is administered simultaneously with, prior to, or after the nuclease agent or the one or more nucleic acids encoding the nuclease agent, wherein the nuclease agent cleaves the nuclease target site in the target genomic locus, the nucleic acid construct or the coding sequence for the multidomain therapeutic protein is inserted into the target genomic locus to create a modified target genomic locus, and the multidomain therapeutic protein comprising the TfR-binding delivery domain fused to an acid sphingomyelinase polypeptide is expressed from the modified target genomic locus. In another aspect, provided are methods of preventing or reducing the onset of a sign or symptom of acid sphingomyelinase deficiency in a subject in need thereof, comprising administering to the subject any of the above multidomain therapeutic proteins, thereby preventing or reducing the onset of a sign or symptom of the acid sphingomyelinase deficiency in the subject. In another aspect, provided are methods of preventing or reducing the onset of a sign or symptom of acid sphingomyelinase deficiency in a subject in need thereof, comprising administering to the subject any of the above compositions, wherein the coding sequence for the multidomain therapeutic protein is operably linked to a promoter in the nucleic acid construct and is expressed in the subject, thereby preventing or reducing the onset of a sign or symptom of the acid sphingomyelinase deficiency in the subject. In another aspect, provided are methods of preventing or reducing the onset of a sign or symptom of acid sphingomyelinase deficiency in a subject in need thereof, comprising administering to the subject any of the above compositions, optionally wherein the nucleic acid construct is administered simultaneously with, prior to, or after the nuclease agent or the one or more nucleic acids encoding the nuclease agent, wherein the nuclease agent cleaves the nuclease target site, the nucleic acid construct or the coding sequence for the multidomain therapeutic protein is inserted into the target genomic locus to create a modified target genomic locus, and the multidomain therapeutic protein comprising the TfR-binding delivery domain fused to an acid sphingomyelinase polypeptide is expressed from the modified target genomic locus, thereby preventing or reducing the onset of a sign or symptom of the acid sphingomyelinase deficiency in the subject.

[0032] In some such methods, the acid sphingomyelinase deficiency is Niemann-Pick disease type A. In some such methods, the acid sphingomyelinase deficiency is Niemann-Pick disease type B. In some such methods, the subject is a human subject. In some such methods, the subject is a neonatal subject. In some such methods, the method results in serum levels of the multidomain therapeutic protein in the subject of at least about 1 μg/mL, at least about 2 μg/mL, at least about 3 μg/mL, at least about 4 μg/mL, at least about 5 μg/mL, at least about 6 μg/mL, at least about 7 μg/mL, at least about 8 μg/mL, at least about 9 μg/mL, or at least about 10 μg/mL. In some such methods, the method results in serum levels of the multidomain therapeutic protein in the subject of at least about 2 μg/mL or at least about 5 μg/mL. In some such methods, the method results in serum levels of the multidomain therapeutic protein in the subject of between about 2 μg/mL and about 30 μg/mL or between about 2 μg/mL and about 20 μg/mL. In some such methods, the method results in serum levels of the multidomain therapeutic protein in the subject of between about 5 μg/mL and about 30 μg/mL or between about 5 μg/mL and about 20 g/mL. In some such methods, the method achieves acid sphingomyelinase activity levels of at least about 40% of normal, at least about 45% of normal, at least about 50%, at least about 60%, at least about 70%, at least about 80%, at least about 90%, or 100% of normal.

[0033] In some such methods, the method further comprises assessing preexisting AAV immunity in the subject prior to administering the nucleic acid construct to the subject. In some such methods, the preexisting AAV immunity is preexisting AAV8 immunity. In some such methods, assessing preexisting AAV immunity comprises assessing immunogenicity using a total antibody immune assay or a neutralizing antibody assay.

### BRIEF DESCRIPTION OF THE FIGURES

[0034] FIG. 1 shows amino acid sequences of various anti-human transferrin receptor scFv molecules in Vₖ-3xG₄S(SEQ ID NO: 616)-V_{H} format.

[0035] FIGS. 2A-2C show anti-human TFRC scFv antibody clones deliver GAA to the cerebrum of Tfrc^{hum} mice. Anti-human TfR:GAA molecules 69261, 69329, 12839, 12841, 12843 and 12845 (FIG. 2A) 69348, 12795, 12799, 12801, 12850 and 12798 (FIG. 2B); and 12802, 69340, 12847, 12848, 69307 and 69323 (FIG. 2C) were tested. Each lane=1 mouse. Delivery by HDD.

[0036] FIG. 3 shows a subset of anti-hTFRC antibodies (12798, 12850, 69323, 12841, 12843, 12845, 12847, 12848, 12799, 69307 and 12839) delivered mature GAA to the brain parenchyma in scfv:GAA format (delivery by HDD). Lane E corresponds to endothelium and Lane P corresponds to parenchyma. Ratio of affinity for mfTfR:human TfR are indicated below the image (mf refers to Macaca fascicularis monkey).

[0037] FIG. 4 shows anti-hTFRC antibodies (12799, 12843, 12847 and 12839) delivered mature GAA to the brain parenchyma in scfv:GAA format (AAV8 episomal liver depot gene therapy). Lane E corresponds to endothelium and Lane P corresponds to parenchyma.

[0038] FIG. 5 shows episomal AAV8 liver depot anti-hTFRC scfv:GAA antibodies delivered GAA protein to CNS (cerebellum, cerebrum, spinal cord), heart, and muscle (quadricep) in Gaa^{-/-}/Tfrc^{hum} mice.

[0039] FIG. 6 shows episomal AAV8 liver depot anti-hTFRC scfv:GAA antibodies (12839, 12843 and 12847) rescued glycogen storage in central nervous system (CNS) (cerebellum, cerebrum, spinal cord), heart, and muscle (quadricep) in Gaa^{-/-}/Tfrc^{hum} mice.

[0040] FIGS. 7A-7D show episomal AAV8 liver depot anti-hTFRC scfv:GAA antibodies (12847, 12843 and 12799) rescued glycogen storage in brain (brain thalamus (FIG. 7A), brain cerebral cortex (FIG. 7B), brain hippocampus CA1 (FIG. 7C)) and muscle (quadricep (FIG. 7D)) in Gaa^{-/-}/Tfrc^{hum} mice.

[0041] FIG. 8 shows albumin insertion of anti-hTFRC 12847scfv:GAA delivers mature GAA protein to CNS and muscle of Pompe model mice.

[0042] FIG. 9 shows albumin insertion of anti-hTFRC 12847scfv:GAA rescues glycogen storage in CNS and muscle of Pompe model mice. One Way ANOVA (* p<0.01; **p<0.001; ***p<0.0001).

[0043] FIG. 10 shows GAA activity in serum following Cas9-mediated insertion of AAV-delivered anti-TfR1:GAA or anti-CD63:GAA into the cynomolgus monkey albumin locus. Vehicle-only was used as a negative control. One unit of GAA activity is defined as the amount of enzyme that generates 1.0 μmol of 4-MU per min at pH 4.5 at 37° C. Error bars are SEM. N=1 for vehicle; N=2-4 for all others.

[0044] FIG. 11 shows albumin insertion of anti-hTFRC 12847scfv:GAA delivers mature GAA protein to CNS and muscle of cynomolgus monkeys. For the bar graphs, mature GAA was quantified by western blot of tissue lysates, and error bars are SD.

[0045] FIG. 12 shows the interaction of Mammarenavirus machupoense GP1 protein (PDB 3KAS), human ferritin (PDB 6GSR), Plasmodium vivax Sal-1 PvRBP2b protein (PDB 6D04), human HFE protein (PDB 1DE4), and human transferrin (PDB 1SUV) molecules superimposed on two TfR molecules in a symmetrical unit. For Mammarenavirus machupoense GP1 protein and human ferritin, only one copy in the symmetrical unit is shown to reduce complexity of the figure for clear view.

[0046] FIG. 13 depicts Hydrogen-Deuterium Exchange Mass Spectrometry (HDX) protections for the antibodies tested in HDX-MS experiments can be assigned to 5 regions in TfR (PDB 1SUV).

[0047] FIG. 14 illustrates TfR regions protected by REGN17513, a representation of antibodies that cause HDX protections in TfR apical domain that overlap with Mammarenavirus machupoense GP1 protein, human ferritin, and Plasmodium vivax PvRBP2b protein binding sites.

[0048] FIG. 15 illustrates TfR regions protected by REGN17510, a representation of antibodies with HDX protections in TfR apical domain that are not shared by other TfR binding partners shown in FIG. 15.

[0049] FIG. 16 illustrates TfR regions protected by REGN17515, a representation of antibodies with HDX protections in TfR apical domain that share binding sites with human ferritin and Plasmodium vivax Sal-1 PvRBP2b protein.

[0050] FIG. 17 illustrates TfR regions protected by REGN17514, a representation of antibodies with HDX protections in TfR protease-like domain and share binding sites with Plasmodium vivax Sal-1 PvRBP2b protein.

[0051] FIG. 18 illustrates TfR regions protected by REGN17508, a representation of antibodies with HDX protections in TfR protease-like domain. This region is not utilized by other TfR interacting molecules shown in FIG. 18.

[0052] FIGS. 19A and 19B show GAA enzymatic activity in the media after insertion of various anti-TfR:GAA insertion templates (CpG depleted and native) into the albumin locus of primary human hepatocytes after delivery by rAAV2.

[0053] FIG. 20A shows western blots showing that anti-human TfR antibody clones (0 CpG and native) deliver GAA to the brain (cerebrum) of 3-month-old Gaa^{-/-}/Tfrc^{hum} mice dosed intravenously with LNP-g666 (3 mg/kg) and various recombinant AAV8 anti-TfR:GAA or AAV8 anti-CD63:GAA insertion templates. Each lane=1 mouse.

[0054] FIG. 20B shows that albumin insertion of anti-hTfR:GAA rescues glycogen storage in cerebrum, quadriceps, diaphragm, and heart in Gaa^{-/-}/Tfrc^{hum}, mice dosed intravenously with LNP-g666 (3 mg/kg) and various recombinant AAV8 anti-TfR:GAA or AAV8 anti-CD63:GAA insertion templates. Glycogen levels were measured at 3 weeks post-administration. Wt untreated mice were a positive control, and Gaa^{-/-} untreated mice were a negative control.

[0055] FIG. 21 shows a schematic of LNP-g9860, which is a lipid nanoparticle containing Cas9 mRNA and sgRNA 9860 targeting human albumin (ALB) intron 1, and a recombinant AAV8 (rAAV8) capsid packaged with an anti-TfR:ASM insertion template.

[0056] FIG. 22 shows a schematic for CRISPR/Cas9-mediated insertion of an anti-TfR:ASM insertion template at the ALB locus. The human ALB locus is depicted, with the Cas9 cut site denoted with scissors. The splice acceptor site flanking the anti-TfR:ASM transgene in the insertion template is depicted. Following insertion and transcription driven by the endogenous ALB promoter, splicing between ALB exon 1 and the inserted anti-TfR:ASM DNA template occurs, diagrammed in dashed lines, to produce a hybrid ALB-anti-TfR:ASM mRNA. The ALB signal peptide promotes secretion of anti-TfR:ASM and is removed during protein maturation to yield anti-TfR:ASM in plasma.

[0057] FIG. 23 shows that AAV plasmid constructs express stable anti-TfR:ASM in vitro.

[0058] FIG. 24 shows that anti-TfR:ASM fusion proteins retain sphingomyelinase activity in vitro.

[0059] FIG. 25 shows that hydrodynamic delivery validates expression, secretion, and BBB crossing of anti-TfR:ASM fusion proteins in Tfrc^{hum} mice.

[0060] FIG. 26 shows the experimental setup to test rAAV8 episomal liver depot of TfR-targeted ASM in ASMD mice.

[0061] FIG. 27 shows liver hSMPD1 DNA and ASM protein expression following rAAV8 episomal delivery of ASM:anti-TfR.

[0062] FIGS. 28A-28E show rAAV8 episomal delivery of ASM:anti-TfR reduces sphingomyelin accumulation in cerebellum (FIG. 28A), cerebrum (FIG. 28B), liver (FIG. 28C), spleen (FIG. 28D), and lung (FIG. 28E) in Smpd1^{-/-} mice.

[0063] FIG. 29 shows the experimental setup to test hydrodynamic delivery of redesigned TfR-targeted ASM plasmids in Tfrc^{hum} mice.

[0064] FIG. 30 shows that hydrodynamic delivery validates expression and secretion of anti-TfR:ASM fusion proteins in Tfrc^{hum} mice.

[0065] FIG. 31 shows that AAV plasmid constructs express stable anti-TfR:ASM and retain normal ASM activity in vitro in Huh-7 cells.

[0066] FIG. 32 shows the experimental setup for testing albumin insertion of anti-TfR:ASM templates in Tfrc^{hum/hum}; Smpd1^{-/-} mice.

[0067] FIG. 33 shows all TfR:ASM formats have uniform transcript delivery and expression with albumin insertion in Tfrc^{hum/hum}; Smpd1^{-/-} mice. No significant differences in DNA or RNA levels by TaqMan.

[0068] FIGS. 34A-34D show albumin insertion of anti-TfR:ASM reduces sphingomyelin in target tissues including cerebellum (FIG. 34A), lung (FIG. 34B), spleen (FIG. 34C), and heart (FIG. 34D) in Smpd1^{-/-} mice. Kruskal-Wallis to determine significance; only significant differences between Saline and Treated samples are being shown.

[0069] FIG. 35 shows albumin insertion of anti-TfR:ASM does not induce splenomegaly in Tfrc^{hum/hum}; Smpd1^{-/-} mice. Statistical analysis: One-Way ANOVA (Kruskal-Wallis test). Absence of statistical significance indicates insignificance, almost exclusively p=>0.9999.

### DEFINITIONS

[0070] The terms “protein,” “polypeptide,” and “peptide,” used interchangeably herein, include polymeric forms of amino acids of any length, including coded and non-coded amino acids and chemically or biochemically modified or derivatized amino acids. The terms also include polymers that have been modified, such as polypeptides having modified peptide backbones. The term “domain” refers to any part of a protein or polypeptide having a particular function or structure.

[0071] Proteins are said to have an “N-terminus” and a “C-terminus.” The term “N-terminus” relates to the start of a protein or polypeptide, terminated by an amino acid with a free amine group (—NH2). The term “C-terminus” relates to the end of an amino acid chain (protein or polypeptide), terminated by a free carboxyl group (—COOH).

[0072] The terms “nucleic acid” and “polynucleotide,” used interchangeably herein, include polymeric forms of nucleotides of any length, including ribonucleotides, deoxyribonucleotides, or analogs or modified versions thereof. They include single-, double-, and multi-stranded DNA or RNA, genomic DNA, cDNA, DNA-RNA hybrids, and polymers comprising purine bases, pyrimidine bases, or other natural, chemically modified, biochemically modified, non-natural, or derivatized nucleotide bases.

[0073] Nucleic acids are said to have “5′ ends” and “3′ ends” because mononucleotides are reacted to make oligonucleotides in a manner such that the 5′ phosphate of one mononucleotide pentose ring is attached to the 3′ oxygen of its neighbor in one direction via a phosphodiester linkage. An end of an oligonucleotide is referred to as the “5′ end” if its 5′ phosphate is not linked to the 3′ oxygen of a mononucleotide pentose ring. An end of an oligonucleotide is referred to as the “3′ end” if its 3′ oxygen is not linked to a 5′ phosphate of another mononucleotide pentose ring. A nucleic acid sequence, even if internal to a larger oligonucleotide, also may be said to have 5′ and 3′ ends. In either a linear or circular DNA molecule, discrete elements are referred to as being “upstream” or 5′ of the “downstream” or 3′ elements.

[0074] The term “genomically integrated” refers to a nucleic acid that has been introduced into a cell such that the nucleotide sequence integrates into the genome of the cell. Any protocol may be used for the stable incorporation of a nucleic acid into the genome of a cell.

[0075] The term “viral vector” refers to a recombinant nucleic acid that includes at least one element of viral origin and includes elements sufficient for or permissive of packaging into a viral vector particle. The vector and/or particle can be utilized for the purpose of transferring DNA, RNA, or other nucleic acids into cells in vitro, ex vivo, or in vivo. Numerous forms of viral vectors are known.

[0076] The term “isolated” with respect to cells, tissues (e.g., liver samples), proteins, and nucleic acids includes cells, tissues (e.g., liver samples), proteins, and nucleic acids that are relatively purified with respect to other bacterial, viral, cellular, or other components that may normally be present in situ, up to and including a substantially pure preparation of the cells, tissues (e.g., liver samples), proteins, and nucleic acids. The term “isolated” also includes cells, tissues (e.g., liver samples), proteins, and nucleic acids that have no naturally occurring counterpart, have been chemically synthesized and are thus substantially uncontaminated by other cells, tissues (e.g., liver samples), proteins, and nucleic acids, or has been separated or purified from most other components (e.g., cellular components) with which they are naturally accompanied (e.g., other cellular proteins, polynucleotides, or cellular components).

[0077] The term “wild type” includes entities having a structure and/or activity as found in a normal (as contrasted with mutant, diseased, altered, or so forth) state or context. Wild type genes and polypeptides often exist in multiple different forms (e.g., alleles).

[0078] The term “endogenous sequence” refers to a nucleic acid sequence that occurs naturally within a cell or animal. For example, an endogenous ALB sequence of a human refers to a native ALB sequence that naturally occurs at the ALB locus in the human.

[0079] “Exogenous” molecules or sequences include molecules or sequences that are not normally present in a cell in that form. Normal presence includes presence with respect to the particular developmental stage and environmental conditions of the cell. An exogenous molecule or sequence, for example, can include a mutated version of a corresponding endogenous sequence within the cell, such as a humanized version of the endogenous sequence, or can include a sequence corresponding to an endogenous sequence within the cell but in a different form (i.e., not within a chromosome). In contrast, endogenous molecules or sequences include molecules or sequences that are normally present in that form in a particular cell at a particular developmental stage under particular environmental conditions.

[0080] The term “heterologous” when used in the context of a nucleic acid or a protein indicates that the nucleic acid or protein comprises at least two segments that do not naturally occur together in the same molecule. For example, the term “heterologous,” when used with reference to segments of a nucleic acid or segments of a protein, indicates that the nucleic acid or protein comprises two or more sub-sequences that are not found in the same relationship to each other (e.g., joined together) in nature. As one example, a “heterologous” region of a nucleic acid vector is a segment of nucleic acid within or attached to another nucleic acid molecule that is not found in association with the other molecule in nature. For example, a heterologous region of a nucleic acid vector could include a coding sequence flanked by sequences not found in association with the coding sequence in nature. Likewise, a “heterologous” region of a protein is a segment of amino acids within or attached to another peptide molecule that is not found in association with the other peptide molecule in nature (e.g., a fusion protein, or a protein with a tag). Similarly, a nucleic acid or protein can comprise a heterologous label or a heterologous secretion or localization sequence.

[0081] “Codon optimization” (i.e., “codon optimized” sequences) takes advantage of the degeneracy of codons, as exhibited by the multiplicity of three-base pair codon combinations that specify an amino acid, and generally includes a process of modifying a nucleic acid sequence for enhanced expression in particular host cells by replacing at least one codon of the native sequence with a codon that is more frequently or most frequently used in the genes of the host cell while maintaining the native amino acid sequence. For example, a nucleic acid encoding a polypeptide of interest can be modified to substitute codons having a higher frequency of usage in a given prokaryotic or eukaryotic cell, including a bacterial cell, a yeast cell, a human cell, a non-human cell, a mammalian cell, a rodent cell, a mouse cell, a rat cell, a hamster cell, or any other host cell, as compared to the naturally occurring nucleic acid sequence. Codon usage tables are readily available, for example, at the “Codon Usage Database.” These tables can be adapted in a number of ways. See Nakamura et al. (2000) Nucleic Acids Res. 28(1):292, herein incorporated by reference in its entirety for all purposes. Computer algorithms for codon optimization of a particular sequence for expression in a particular host are also available (see, e.g., Gene Forge).

[0082] The term “locus” refers to a specific location of a gene (or significant sequence), DNA sequence, polypeptide-encoding sequence, or position on a chromosome of the genome of an organism. For example, an “ALB locus” may refer to the specific location of an ALB gene, ALB DNA sequence, albumin-encoding sequence, or ALB position on a chromosome of the genome of an organism that has been identified as to where such a sequence resides. An “ALB locus” may comprise a regulatory element of an ALB gene, including, for example, an enhancer, a promoter, 5′ and/or 3′ untranslated region (UTR), or a combination thereof.

[0083] The term “gene” refers to DNA sequences in a chromosome that may contain, if naturally present, at least one coding and at least one non-coding region. The DNA sequence in a chromosome that codes for a product (e.g., but not limited to, an RNA product and/or a polypeptide product) can include the coding region interrupted with non-coding introns and sequence located adjacent to the coding region on both the 5′ and 3′ ends such that the gene corresponds to the full-length mRNA (including the 5′ and 3′ untranslated sequences). Additionally, other non-coding sequences including regulatory sequences (e.g., but not limited to, promoters, enhancers, and transcription factor binding sites), polyadenylation signals, internal ribosome entry sites, silencers, insulating sequence, and matrix attachment regions may be present in a gene. These sequences may be close to the coding region of the gene (e.g., but not limited to, within 10 kb) or at distant sites, and they influence the level or rate of transcription and translation of the gene.

[0084] The term “allele” refers to a variant form of a gene. Some genes have a variety of different forms, which are located at the same position, or genetic locus, on a chromosome. A diploid organism has two alleles at each genetic locus. Each pair of alleles represents the genotype of a specific genetic locus. Genotypes are described as homozygous if there are two identical alleles at a particular locus and as heterozygous if the two alleles differ.

[0085] A “promoter” is a regulatory region of DNA usually comprising a TATA box capable of directing RNA polymerase II to initiate RNA synthesis at the appropriate transcription initiation site for a particular polynucleotide sequence. A promoter may additionally comprise other regions which influence the transcription initiation rate. The promoter sequences disclosed herein modulate transcription of an operably linked polynucleotide. A promoter can be active in one or more of the cell types disclosed herein (e.g., a mouse cell, a rat cell, a pluripotent cell, a one-cell stage embryo, a differentiated cell, or a combination thereof). A promoter can be, for example, a constitutively active promoter, a conditional promoter, an inducible promoter, a temporally restricted promoter (e.g., a developmentally regulated promoter), or a spatially restricted promoter (e.g., a cell-specific or tissue-specific promoter). Examples of promoters can be found, for example, in WO 2013/176772, herein incorporated by reference in its entirety for all purposes.

[0086] “Operable linkage” or being “operably linked” includes juxtaposition of two or more components (e.g., a promoter and another sequence element) such that both components function normally and allow the possibility that at least one of the components can mediate a function that is exerted upon at least one of the other components. For example, a promoter can be operably linked to a coding sequence if the promoter controls the level of transcription of the coding sequence in response to the presence or absence of one or more transcriptional regulatory factors. Operable linkage can include such sequences being contiguous with each other or acting in trans (e.g., a regulatory sequence can act at a distance to control transcription of the coding sequence).

[0087] The methods and compositions provided herein employ a variety of different components. Some components throughout the description can have active variants and fragments. The term “functional” refers to the innate ability of a protein or nucleic acid (or a fragment or variant thereof) to exhibit a biological activity or function. The biological functions of functional fragments or variants may be the same or may in fact be changed (e.g., with respect to their specificity or selectivity or efficacy) in comparison to the original molecule, but with retention of the molecule's basic biological function.

[0088] The term “variant” refers to a nucleotide sequence differing from the sequence most prevalent in a population (e.g., by one nucleotide) or a protein sequence different from the sequence most prevalent in a population (e.g., by one amino acid).

[0089] The term “fragment,” when referring to a protein, means a protein that is shorter or has fewer amino acids than the full-length protein. The term “fragment,” when referring to a nucleic acid, means a nucleic acid that is shorter or has fewer nucleotides than the full-length nucleic acid. A fragment can be, for example, when referring to a protein fragment, an N-terminal fragment (i.e., removal of a portion of the C-terminal end of the protein), a C-terminal fragment (i.e., removal of a portion of the N-terminal end of the protein), or an internal fragment (i.e., removal of a portion of each of the N-terminal and C-terminal ends of the protein). A fragment can be, for example, when referring to a nucleic acid fragment, a 5′ fragment (i.e., removal of a portion of the 3′ end of the nucleic acid), a 3′ fragment (i.e., removal of a portion of the 5′ end of the nucleic acid), or an internal fragment (i.e., removal of a portion each of the 5′ and 3′ ends of the nucleic acid).

[0090] “Sequence identity” or “identity” in the context of two polynucleotides or polypeptide sequences refers to the residues in the two sequences that are the same when aligned for maximum correspondence over a specified comparison window. When percentage of sequence identity is used in reference to proteins, residue positions which are not identical often differ by conservative amino acid substitutions, where amino acid residues are substituted for other amino acid residues with similar chemical properties (e.g., charge or hydrophobicity) and therefore do not change the functional properties of the molecule. When sequences differ in conservative substitutions, the percent sequence identity may be adjusted upwards to correct for the conservative nature of the substitution. Sequences that differ by such conservative substitutions are said to have “sequence similarity” or “similarity.” Means for making this adjustment are well known. Typically, this involves scoring a conservative substitution as a partial rather than a full mismatch, thereby increasing the percentage sequence identity. Thus, for example, where an identical amino acid is given a score of 1 and a non-conservative substitution is given a score of zero, a conservative substitution is given a score between zero and 1. The scoring of conservative substitutions is calculated, e.g., as implemented in the program PC/GENE (Intelligenetics, Mountain View, California).

[0091] “Percentage of sequence identity” includes the value determined by comparing two optimally aligned sequences (greatest number of perfectly matched residues) over a comparison window, wherein the portion of the polynucleotide sequence in the comparison window may comprise additions or deletions (i.e., gaps) as compared to the reference sequence (which does not comprise additions or deletions) for optimal alignment of the two sequences. The percentage is calculated by determining the number of positions at which the identical nucleic acid base or amino acid residue occurs in both sequences to yield the number of matched positions, dividing the number of matched positions by the total number of positions in the window of comparison, and multiplying the result by 100 to yield the percentage of sequence identity. Unless otherwise specified (e.g., the shorter sequence includes a linked heterologous sequence), the comparison window is the full length of the shorter of the two sequences being compared.

[0092] Unless otherwise stated, sequence identity/similarity values include the value obtained using GAP Version 10 using the following parameters: % identity and % similarity for a nucleotide sequence using GAP Weight of 50 and Length Weight of 3, and the nwsgapdna.cmp scoring matrix; % identity and % similarity for an amino acid sequence using GAP Weight of 8 and Length Weight of 2, and the BLOSUM62 scoring matrix; or any equivalent program thereof. “Equivalent program” includes any sequence comparison program that, for any two sequences in question, generates an alignment having identical nucleotide or amino acid residue matches and an identical percent sequence identity when compared to the corresponding alignment generated by GAP Version 10.

[0093] The term “conservative amino acid substitution” refers to the substitution of an amino acid that is normally present in the sequence with a different amino acid of similar size, charge, or polarity. Examples of conservative substitutions include the substitution of a non-polar (hydrophobic) residue such as isoleucine, valine, or leucine for another non-polar residue. Likewise, examples of conservative substitutions include the substitution of one polar (hydrophilic) residue for another such as between arginine and lysine, between glutamine and asparagine, or between glycine and serine. Additionally, the substitution of a basic residue such as lysine, arginine, or histidine for another, or the substitution of one acidic residue such as aspartic acid or glutamic acid for another acidic residue are additional examples of conservative substitutions. Examples of non-conservative substitutions include the substitution of a non-polar (hydrophobic) amino acid residue such as isoleucine, valine, leucine, alanine, or methionine for a polar (hydrophilic) residue such as cysteine, glutamine, glutamic acid or lysine and/or a polar residue for a non-polar residue. Typical amino acid categorizations are summarized below.

TABLE 1
Amino Acid Categorizations.

| | | | | | |
|---|---|---|---|---|---|
| Alanine | Ala | A | Nonpolar | Neutral | 1.8 |
| Arginine | Arg | R | Polar | Positive | −4.5 |
| Asparagine | Asn | N | Polar | Neutral | −3.5 |
| Aspartic acid | Asp | D | Polar | Negative | −3.5 |
| Cysteine | Cys | C | Nonpolar | Neutral | 2.5 |
| Glutamic acid | Glu | E | Polar | Negative | −3.5 |
| Glutamine | Gln | Q | Polar | Neutral | −3.5 |
| Glycine | Gly | G | Nonpolar | Neutral | −0.4 |
| Histidine | His | H | Polar | Positive | −3.2 |
| Isoleucine | Ile | I | Nonpolar | Neutral | 4.5 |
| Leucine | Leu | L | Nonpolar | Neutral | 3.8 |
| Lysine | Lys | K | Polar | Positive | −3.9 |
| Methionine | Met | M | Nonpolar | Neutral | 1.9 |
| Phenylalanine | Phe | F | Nonpolar | Neutral | 2.8 |
| Proline | Pro | P | Nonpolar | Neutral | −1.6 |
| Serine | Ser | S | Polar | Neutral | −0.8 |
| Threonine | Thr | T | Polar | Neutral | −0.7 |
| Tryptophan | Trp | W | Nonpolar | Neutral | −0.9 |
| Tyrosine | Tyr | Y | Polar | Neutral | −1.3 |
| Valine | Val | V | Nonpolar | Neutral | 4.2 |

[0094] A “homologous” sequence (e.g., nucleic acid sequence) includes a sequence that is either identical or substantially similar to a known reference sequence, such that it is, for example, at least 50%, at least 55%, at least 60%, at least 65%, at least 70%, at least 75%, at least 80%, at least 85%, at least 90%, at least 95%, at least 96%, at least 97%, at least 98%, at least 99%, or 100% identical to the known reference sequence. Homologous sequences can include, for example, orthologous sequence and paralogous sequences. Homologous genes, for example, typically descend from a common ancestral DNA sequence, either through a speciation event (orthologous genes) or a genetic duplication event (paralogous genes). “Orthologous” genes include genes in different species that evolved from a common ancestral gene by speciation. Orthologs typically retain the same function in the course of evolution. “Paralogous” genes include genes related by duplication within a genome. Paralogs can evolve new functions in the course of evolution.

[0095] The term “in vitro” includes artificial environments and to processes or reactions that occur within an artificial environment (e.g., a test tube or an isolated cell or cell line). The term “in vivo” includes natural environments (e.g., a cell or organism or body) and to processes or reactions that occur within a natural environment. The term “ex vivo” includes cells that have been removed from the body of an individual and processes or reactions that occur within such cells.

[0096] The term “antibody,” as used herein, includes immunoglobulin molecules comprising four polypeptide chains, two heavy (H) chains and two light (L) chains inter-connected by disulfide bonds. Each heavy chain comprises a heavy chain variable region (abbreviated herein as HCVR or V_{H}) and a heavy chain constant region. The heavy chain constant region comprises three domains, CH1, CH2 and CH3. Each light chain comprises a light chain variable region (abbreviated herein as LCVR or VL or VK) and a light chain constant region. The light chain constant region comprises one domain, CL. The V_{H} and VL regions can be further subdivided into regions of hypervariability, termed complementarity determining regions (CDR), interspersed with regions that are more conserved, termed framework regions (FR). Each VH and VL is composed of three CDRs and four FRs, arranged from amino-terminus to carboxy-terminus in the following order: FR1, CDR1, FR2, CDR2, FR3, CDR3, FR4 (heavy chain CDRs may be abbreviated as HCDR1, HCDR2 and HCDR3; light chain CDRs may be abbreviated as LCDR1, LCDR2 and LCDR3. The term “high affinity” antibody refers to those antibodies having a binding affinity to their target of at least 10⁻⁹ M, at least 10⁻¹⁰ M; at least 10⁻¹¹ M; or at least 10⁻¹² M, as measured by surface plasmon resonance, e.g., BIACORE™ or solution-affinity ELISA. The term “antibody” may encompass any type of antibody, such as, e.g., monoclonal or polyclonal. Moreover, the antibody may be or any origin, such as, e.g., mammalian or non-mammalian. In one embodiment, the antibody may be mammalian or avian. In a further embodiment, the antibody may be or human origin and may further be a human monoclonal antibody.

[0097] The phrase “bispecific antibody” includes an antibody capable of selectively binding two or more epitopes. Bispecific antibodies generally comprise two different heavy chains, with each heavy chain specifically binding a different epitope-either on two different molecules (e.g., antigens) or on the same molecule (e.g., on the same antigen). If a bispecific antibody is capable of selectively binding two different epitopes (a first epitope and a second epitope), the affinity of the first heavy chain for the first epitope will generally be at least one to two or three or four orders of magnitude lower than the affinity of the first heavy chain for the second epitope, and vice versa. The epitopes recognized by the bispecific antibody can be on the same or a different target (e.g., on the same or a different protein). Bispecific antibodies can be made, for example, by combining heavy chains that recognize different epitopes of the same antigen. For example, nucleic acid sequences encoding heavy chain variable sequences that recognize different epitopes of the same antigen can be fused to nucleic acid sequences encoding different heavy chain constant regions, and such sequences can be expressed in a cell that expresses an immunoglobulin light chain. A typical bispecific antibody has two heavy chains each having three heavy chain CDRs, followed by (N-terminal to C-terminal) a CH1 domain, a hinge, a CH2 domain, and a CH3 domain, and an immunoglobulin light chain that either does not confer antigen-binding specificity but that can associate with each heavy chain, or that can associate with each heavy chain and that can bind one or more of the epitopes bound by the heavy chain antigen-binding regions, or that can associate with each heavy chain and enable binding or one or both of the heavy chains to one or both epitopes.

[0098] The phrase “heavy chain,” or “immunoglobulin heavy chain” includes an immunoglobulin heavy chain constant region sequence from any organism, and unless otherwise specified includes a heavy chain variable domain. Heavy chain variable domains include three heavy chain CDRs and four FR regions, unless otherwise specified. Fragments of heavy chains include CDRs, CDRs and FRs, and combinations thereof. A typical heavy chain has, following the variable domain (from N-terminal to C-terminal), a CH1 domain, a hinge, a CH2 domain, and a CH3 domain. A functional fragment of a heavy chain includes a fragment that is capable of specifically recognizing an antigen (e.g., recognizing the antigen with a KD in the micromolar, nanomolar, or picomolar range), that is capable of expressing and secreting from a cell, and that comprises at least one CDR.

[0099] The phrase “light chain” includes an immunoglobulin light chain constant region sequence from any organism, and unless otherwise specified includes human kappa and lambda light chains. Light chain variable (VL) domains typically include three light chain CDRs and four framework (FR) regions, unless otherwise specified. Generally, a full-length light chain includes, from amino terminus to carboxyl terminus, a VL domain that includes FR1-CDR1-FR2-CDR2-FR3-CDR3-FR4, and a light chain constant domain. Light chains that can be used herein include, for example, those that do not selectively bind either the first or second antigen selectively bound by the antigen-binding protein. Suitable light chains include those that can be identified by screening for the most commonly employed light chains in existing antibody libraries (wet libraries or in silico), where the light chains do not substantially interfere with the affinity and/or selectivity of the antigen-binding domains of the antigen-binding proteins. Suitable light chains include those that can bind one or both epitopes that are bound by the antigen-binding regions of the antigen-binding protein.

[0100] The phrase “variable domain” includes an amino acid sequence of an immunoglobulin light or heavy chain (modified as desired) that comprises the following amino acid regions, in sequence from N-terminal to C-terminal (unless otherwise indicated): FR1, CDR1, FR2, CDR2, FR3, CDR3, FR4. A “variable domain” includes an amino acid sequence capable of folding into a canonical domain (V_{H} or VL) having a dual beta sheet structure wherein the beta sheets are connected by a disulfide bond between a residue of a first beta sheet and a second beta sheet.

[0101] The phrase “complementarity determining region,” or the term “CDR,” includes an amino acid sequence encoded by a nucleic acid sequence of an organism's immunoglobulin genes that normally (i.e., in a wild type animal) appears between two framework regions in a variable region of a light or a heavy chain of an immunoglobulin molecule (e.g., an antibody or a T cell receptor). A CDR can be encoded by, for example, a germline sequence or a rearranged or unrearranged sequence, and, for example, by a naive or a mature B cell or a T cell. In some circumstances (e.g., for a CDR3), CDRs can be encoded by two or more sequences (e.g., germline sequences) that are not contiguous (e.g., in an unrearranged nucleic acid sequence) but are contiguous in a B cell nucleic acid sequence, for example, as the result of splicing or connecting the sequences (e.g., V-D-J recombination to form a heavy chain CDR3).

[0102] The term “antibody fragment” refers to one or more fragments of an antibody that retain the ability to specifically bind to an antigen. Examples of binding fragments encompassed within the term “antibody fragment” include (i) a Fab fragment, a monovalent fragment consisting of the VL, V_{H}, CL and CH1 domains; (ii) a F(ab′)2 fragment, a bivalent fragment comprising two Fab fragments linked by a disulfide bridge at the hinge region; (iii) a Fd fragment consisting of the V_{H} and CH1 domains; (iv) a Fv fragment consisting of the VL and VH domains of a single arm of an antibody, (v) a dAb fragment (Ward et al. (1989) Nature 241:544-546), which consists of a V_{H} domain, (vi) an isolated CDR, and (vii) an scFv, which consists of the two domains of the Fv fragment, VL and V_{H}, joined by a synthetic linker to form a single protein chain in which the VL and VH regions pair to form monovalent molecules. Other forms of single chain antibodies, such as diabodies are also encompassed under the term “antibody” (see e.g., Holliger et al. (1993) Proc. Natl. Acad. Sci. U.S.A. 90:6444-6448; Poljak et al. (1994) Structure 2:1121-1123).

[0103] The phrase “Fc-containing protein” includes antibodies, bispecific antibodies, immunoadhesins, and other binding proteins that comprise at least a functional portion of an immunoglobulin CH2 and CH3 region. A “functional portion” refers to a CH2 and CH3 region that can bind a Fc receptor (e.g., an FcyR; or an FcRn, i.e., a neonatal Fc receptor), and/or that can participate in the activation of complement. If the CH2 and CH3 region contains deletions, substitutions, and/or insertions or other modifications that render it unable to bind any Fc receptor and also unable to activate complement, the CH2 and CH3 region is not functional.

[0104] Fc-containing proteins can comprise modifications in immunoglobulin domains, including where the modifications affect one or more effector function of the binding protein (e.g., modifications that affect FcyR binding, FcRn binding and thus half-life, and/or CDC activity). Such modifications include, but are not limited to, the following modifications and combinations thereof, with reference to EU numbering of an immunoglobulin constant region: 238, 239, 248, 249, 250, 252, 254, 255, 256, 258, 265, 267, 268, 269, 270, 272, 276, 278, 280, 283, 285, 286, 289, 290, 292, 293, 294, 295, 296, 297, 298, 301, 303, 305, 307, 308, 309, 311, 312, 315, 318, 320, 322, 324, 326, 327, 328, 329, 330, 331, 332, 333, 334, 335, 337, 338, 339, 340, 342, 344, 356, 358, 359, 360, 361, 362, 373, 375, 376, 378, 380, 382, 383, 384, 386, 388, 389, 398, 414, 416, 419, 428, 430, 433, 434, 435, 437, 438, and 439.

[0105] For example, and not by way of limitation, the binding protein is an Fc-containing protein and exhibits enhanced serum half-life (as compared with the same Fc-containing protein without the recited modification(s)) and have a modification at position 250 (e.g., E or Q); 250 and 428 (e.g., L or F); 252 (e.g., L/Y/F/W or T), 254 (e.g., S or T), and 256 (e.g., S/R/Q/E/D or T); or a modification at 428 and/or 433 (e.g., L/R/SI/P/Q or K) and/or 434 (e.g., H/F or Y); or a modification at 250 and/or 428; or a modification at 307 or 308 (e.g., 308F, V308F), and 434. In another example, the modification can comprise a 428L (e.g., M428L) and 434S (e.g., N434S) modification; a 428L, 2591 (e.g., V259I), and a 308F (e.g., V308F) modification; a 433K (e.g., H433K) and a 434 (e.g., 434Y) modification; a 252, 254, and 256 (e.g., 252Y, 254T, and 256E) modification; a 250Q and 428L modification (e.g., T250Q and M428L); a 307 and/or 308 modification (e.g., 308F or 308P).

[0106] The term “antigen-binding protein,” as used herein, refers to a polypeptide or protein (one or more polypeptides complexed in a functional unit) that specifically recognizes an epitope on an antigen, such as a cell-specific antigen and/or a target antigen provided herein. An antigen-binding protein may be multi-specific. The term “multi-specific” with reference to an antigen-binding protein means that the protein recognizes different epitopes, either on the same antigen or on different antigens. A multi-specific antigen-binding protein provided herein can be a single multifunctional polypeptide, or it can be a multimeric complex of two or more polypeptides that are covalently or non-covalently associated with one another. The term “antigen-binding protein” includes antibodies or fragments thereof provided herein that may be linked to or co-expressed with another functional molecule, for example, another peptide or protein. For example, an antibody or fragment thereof can be functionally linked (e.g., by chemical coupling, genetic fusion, non-covalent association or otherwise) to one or more other molecular entities, such as a protein or fragment thereof to produce a bispecific or a multi-specific antigen-binding molecule with a second binding specificity.

[0107] As used herein, the term “epitope” refers to the portion of the antigen which is recognized by the multi-specific antigen-binding polypeptide. A single antigen (such as an antigenic polypeptide) may have more than one epitope. Epitopes may be defined as structural or functional. Functional epitopes are generally a subset of structural epitopes and are defined as those residues that directly contribute to the affinity of the interaction between the antigen-binding polypeptide and the antigen. Epitopes may also be conformational, that is, composed of non-linear amino acids. In certain embodiments, epitopes may include determinants that are chemically active surface groupings of molecules such as amino acids, sugar side chains, phosphoryl groups, or sulfonyl groups, and, in certain embodiments, may have specific three-dimensional structural characteristics, and/or specific charge characteristics. Epitopes formed from contiguous amino acids are typically retained on exposure to denaturing solvents, whereas epitopes formed by tertiary folding are typically lost on treatment with denaturing solvents.

[0108] The term “domain” refers to any part of a protein or polypeptide having a particular function or structure. Preferably, domains provided herein bind to cell-specific or target antigens. Cell-specific antigen- or target antigen-binding domains, and the like, as used herein, include any naturally occurring, enzymatically obtainable, synthetic, or genetically engineered polypeptide or glycoprotein that specifically binds an antigen.

[0109] The term “half-body” or “half-antibody,” which are used interchangeably, refers to half of an antibody, which essentially contains one heavy chain and one light chain. Antibody heavy chains can form dimers, thus the heavy chain of one half-body can associate with heavy chain associated with a different molecule (e.g., another half-body) or another Fc-containing polypeptide. Two slightly different Fc-domains may “heterodimerize” as in the formation of bispecific antibodies or other heterodimers, -trimers, -tetramers, and the like. See Vincent and Murini (2012) Biotechnol. J. 7(12):1444-1450; and Shimamoto et al. (2012) MAbs 4(5):586-91. In one embodiment, the half-body variable domain specifically recognizes the internalization effector and the half body Fc-domain dimerizes with an Fc-fusion protein that comprises a replacement enzyme (e.g., a peptibody).

[0110] The term “single-chain variable fragment” or “scFv” includes a single chain fusion polypeptide containing an immunoglobulin heavy chain variable region (V_{H}) and an immunoglobulin light chain variable region (VL). In some embodiments, the V_{H} and VL are connect by a linker sequence of 10 to 25 amino acids. ScFv polypeptides may also include other amino acid sequences, such as CL or CH1 regions. ScFv molecules can be manufactured by phage display or made by directly subcloning the heavy and light chains from a hybridoma or B-cell. See Ahmad et al. (2012) Clin. Dev. Immunol. 2012:980250, herein incorporated by reference in its entirety for all purposes.

[0111] As used herein, the term “neonatal” in the context of humans covers human subjects up to or under the age of 1 year (52 weeks), preferably up to or under the age of 24 weeks, more preferably up to or under the age of 12 weeks, more preferably up to or under the age of 8 weeks, and even more preferably up to or under the age of 4 weeks. In certain embodiments, a neonatal human subject is up to 4 weeks of age. In certain embodiments, a neonatal human subject is up to 8 weeks of age. In another embodiment, a neonatal human subject is within 3 weeks after birth. In another embodiment, a neonatal human subject is within 2 weeks after birth. In another embodiment, a neonatal human subject is within 1 week after birth. In another embodiment, a neonatal human subject is within 7 days after birth. In another embodiment, a neonatal human subject is within 6 days after birth. In another embodiment, a neonatal human subject is within 5 days after birth. In another embodiment, a neonatal human subject is within 4 days after birth. In another embodiment, a neonatal human subject is within 3 days after birth. In another embodiment, a neonatal human subject is within 2 days after birth. In another embodiment, a neonatal human subject is within 1 day after birth. The time windows disclosed above are for human subjects and are also meant to cover the corresponding developmental time windows for other animals. As used herein, a “neonatal cell” is a cell of a neonatal subject, and a population of neonatal cells is a population of cells of a neonatal subject.

[0112] As used herein, a “control” as in a control sample or a control subject is a comparator for a measurement, e.g., a diagnostic measurement of a sign or symptom of a disease. In certain embodiments, a control can be a subject sample from the same subject an earlier time point, e.g., before a treatment intervention. In certain embodiments, a control can be a measurement from a normal subject, i.e., a subject not having the disease of the treated subject, to provide a normal control, e.g., an enzyme concentration or activity in a subject sample. In certain embodiments, a normal control can be a population control, i.e., the average of subjects in the general population. In certain embodiments, a control can be an untreated subject with the same disease. In certain embodiments, a control can be a subject treated with a different therapy, e.g., the standard of care. In certain embodiments, a control can be a subject or a population of subjects from a natural history study of subjects with the disease of the subject being compared. In certain embodiments, the control is matched for certain factors to the subject being tested, e.g., age, gender. In certain embodiments, a control may be a control level for a particular lab, e.g., a clinical lab. Selection of an appropriate control is within the ability of those of skill in the art.

[0113] Compositions or methods “comprising” or “including” one or more recited elements may include other elements not specifically recited. For example, a composition that “comprises” or “includes” a protein may contain the protein alone or in combination with other ingredients. The transitional phrase “consisting essentially of” means that the scope of a claim is to be interpreted to encompass the specified elements recited in the claim and those that do not materially affect the basic and novel characteristic(s) of the claimed invention. Thus, the term “consisting essentially of” when used in a claim of this invention is not intended to be interpreted to be equivalent to “comprising.”

[0114] “Optional” or “optionally” means that the subsequently described event or circumstance may or may not occur and that the description includes instances in which the event or circumstance occurs and instances in which the event or circumstance does not.

[0115] Designation of a range of values includes all integers within or defining the range, and all subranges defined by integers within the range. For example, 5-10 nucleotides is understood as 5, 6, 7, 8, 9, or 10 nucleotides, whereas 5-10% is understood to contain 5% and all possible values through 10%.

[0116] At least 17 nucleotides of a 20 nucleotide sequence is understood to include 17, 18, 19, or 20 nucleotides of the sequence provided, thereby providing an upper limit even if one is not specifically provided as it would be clearly understood. Similarly, up to 3 nucleotides would be understood to encompass 0, 1, 2, or 3 nucleotides, providing a lower limit even if one is not specifically provided. When “at least,” “up to,” or other similar language modifies a number, it can be understood to modify each number in the series.

[0117] As used herein, “no more than” or “less than” is understood as the value adjacent to the phrase and logical lower values or integers, as logical from context, to zero. For example, a duplex region of “no more than 2 nucleotide base pairs” has a 2, 1, or 0 nucleotide base pairs. When “no more than” or “less than” is present before a series of numbers or a range, it is understood that each of the numbers in the series or range is modified.

[0118] As used herein, “detecting an analyte” and the like is understood as performing an assay in which the analyte can be detected, if present, wherein the analyte is present in an amount above the level of detection of the assay.

[0119] As used herein, “loss of function” is understood as an activity not being present, e.g., an enzyme activity not being present, for any reason. In certain embodiments, the absence of activity may be due to the absence of a protein having a function, e.g., protein is not transcribed or translated, protein is translated but not stable or not transported appropriately, either intracellularly or systemically. In certain embodiments, the absence of activity may be due to the presence of a mutation, e.g., point mutation, truncation, abnormal splicing, such that a protein is present, but not functional. A loss of function can be a partial or complete loss of function. In certain embodiments, various degrees of loss of function may be known that result in various conditions, severity of disease, or age of onset. As used herein, a loss of function is preferably not a transient loss of function, e.g., due to a stress response or other response that results in a temporary loss of a functional protein. Therapeutic interventions to correct for a loss of function of a protein may include compensation for the loss of function with the protein that is deficient, or with proteins that compensate for the loss of function, but that have a different sequence or structure than the protein for which the function is lost. It is understood that a loss of function of one protein may be compensated for by providing or altering the activity of another protein in the same biological pathway. In certain embodiments, the protein to compensate for the loss of function includes one or more of a truncation, mutation, or non-native sequence to direct trafficking of the protein, either intracellularly or systemically, to overcome the loss of function of the protein. The therapeutic intervention may or may not correct the loss of function of the protein in all cell types or tissues. The therapeutic intervention may include expression of the protein to compensate for a loss of function at a site remote from where the protein lacking function is typically expressed, e.g., where the deficiency results in dysfunction of a cell or organ. The therapeutic intervention may include expression of the protein in the liver to compensate for a loss of function at a site remote from the liver. A number of genetic mutations have been linked with specific loss of function mutations, in both humans and other species.

[0120] As used herein, “enzyme deficiency” is understood as an insufficient level of an enzyme activity due to a loss of function of the protein. An enzyme deficiency can be partial or total, and may result in differences in time of onset or severity of signs or symptoms of the enzyme deficiency depending on the level and site of the loss of function. As used herein, enzyme deficiency is preferably not a transient enzyme deficiency due to stress or other factors. A number of genetic mutations have been linked with enzyme deficiencies, in both humans and other species. In certain embodiments, enzyme deficiencies result in inborn errors of metabolism. In certain embodiments, enzyme deficiencies result in lysosomal storage diseases. In certain embodiments, enzyme deficiencies result in galactosemia. In certain embodiments, enzyme deficiencies result in bleeding disorders.

[0121] As used herein, it is understood that when the maximum amount of a value is represented by 100% (e.g., 100% inhibition or 100% encapsulation) that the value is limited by the method of detection. For example, 100% inhibition is understood as inhibition to a level below the level of detection of the assay, and 100% encapsulation is understood as no material intended for encapsulation can be detected outside the vesicles.

[0122] Unless otherwise apparent from the context, the term “about” encompasses values 5% of a stated value. In certain embodiments, the term “about” is understood to encompass tolerated variation or error within the art, e.g., 2 standard deviations from the mean, or the sensitivity of the method used to take a measurement, or a percent of a value as tolerated in the art, e.g., with age. When “about” is present before the first value of a series, it can be understood to modify each value in the series.

[0123] The term “and/or” refers to and encompasses any and all possible combinations of one or more of the associated listed items, as well as the lack of combinations when interpreted in the alternative (“or”).

[0124] The term “or” refers to any one member of a particular list and also includes any combination of members of that list.

[0125] The singular forms of the articles “a,” “an,” and “the” include plural references unless the context clearly dictates otherwise. For example, the term “a protein” or “at least one protein” can include a plurality of proteins, including mixtures thereof.

[0126] Statistically significant means p<0.05.

[0127] In the event of a conflict between a sequence in the application and an indicated accession number or position in an accession number, the sequence in the application predominates.

### DETAILED DESCRIPTION

### I. Overview

[0128] Multidomain therapeutic proteins comprising a TfR-binding delivery domain fused to an acid sphingomyelinase (ASM) polypeptide and nucleic acid constructs and compositions that allow insertion of a multidomain therapeutic protein coding sequence into a target genomic locus such as an endogenous ALB locus and/or expression of the multidomain therapeutic protein coding sequence are provided. The multidomain therapeutic proteins and nucleic acid constructs and compositions can be administered to cells, populations of cells, or subjects and can be used in methods of integration of a multidomain therapeutic protein nucleic acid into a target genomic locus, methods of expression of a multidomain therapeutic protein in a cell, methods of treating ASM deficiency (ASMD) in a subject, and method of preventing or reducing the onset of a sign or symptom of ASMD in a subject.

[0129] Also provided are compositions or combinations or kits comprising a nucleic acid construct comprising a coding sequence for the multidomain therapeutic protein in combination with a nuclease agent or one or more nucleic acids encoding the nuclease agent, wherein the nuclease agent targets a nuclease target site in a target genomic locus. As used herein, the term “in combination with” means that additional component(s) may be administered prior to, concurrent with, or after the administration of the nucleic acid construct. The different components of the combination can be formulated into a single composition, e.g., for simultaneous delivery, or formulated separately into two or more compositions (e.g., a kit including each component, for example, wherein the further agent is in a separate formulation).

[0130] More specifically, described herein in some embodiments is a therapeutic product based on the CRISPR/Cas9 gene editing technology and optionally contained in a lipid nanoparticle (LNP) delivery system, associated with a multidomain therapeutic protein DNA gene insertion template optionally contained in a recombinant adeno-associated virus serotype 8 (rAAV8). The CRISPR/Cas9 component has been designed to target and cut the double stranded DNA at a target gene locus (e.g., a safe harbor locus such as an ALB gene locus in hepatocytes), allowing for the multidomain therapeutic protein DNA template to be inserted in the genome at the target genomic locus. Transgene insertion provides a functional multidomain therapeutic protein gene, encoding the missing or defective genomic SMPD1 in ASMD patients.

[0131] Some of the multidomain therapeutic protein coding sequences in the constructs disclosed herein are optimized for expression. For example, the coding sequences in the constructs disclosed herein may include one or more modifications such as codon optimization (e.g., to human codons), depletion of CpG dinucleotides, mutation of cryptic splice sites, or any combination thereof.

II. Multidomain Therapeutic Proteins and Compositions for Inserting Nucleic Acid Constructs Encoding and/or for Expressing Multidomain Therapeutic Proteins in Cells

[0132] Multidomain therapeutic proteins comprising a TfR-binding delivery domain fused to an acid sphingomyelinase (ASM) polypeptide and nucleic acid constructs and compositions that allow insertion of a multidomain therapeutic protein coding sequence into a target genomic locus such as an endogenous ALB locus and/or expression of the multidomain therapeutic protein coding sequence are provided. The multidomain therapeutic proteins and nucleic acid constructs and compositions can be administered to cells, populations of cells, or subjects and can be used in methods of integration of a multidomain therapeutic protein nucleic acid into a target genomic locus, methods of expression of a multidomain therapeutic protein in a cell, methods of treating ASM deficiency (ASMD) in a subject, and methods of preventing or reducing the onset of a sign or symptom of ASMD in a subject.

[0133] Provided herein are multidomain therapeutic proteins comprising a TfR-binding delivery domain fused to an acid sphingomyelinase (ASM) polypeptide. The multidomain therapeutic proteins and compositions can be used in methods of introducing a multidomain therapeutic protein into a cell or a population of cells or a subject, methods of treating ASMD in a subject, and methods of preventing or reducing the onset of a sign or symptom of ASMD in a subject

[0134] Provided herein are nucleic acid constructs and compositions that allow insertion of a multidomain therapeutic protein coding sequence into a target genomic locus such as an endogenous albumin (ALB) locus and/or expression of the multidomain therapeutic protein coding sequence. Also provided herein are nucleic acid constructs and compositions (e.g., episomal expression vectors) for expression of a multidomain therapeutic protein. The nucleic acid constructs and compositions can be used in methods of introducing a nucleic acid construct comprising a multidomain therapeutic protein coding sequence into a cell or a population of cells or a subject, methods of integration of a multidomain therapeutic protein nucleic acid into a target genomic locus, methods of expression of a multidomain therapeutic protein in a cell, methods of treating ASMD in a subject, and methods of preventing or reducing the onset of a sign or symptom of ASMD in a subject. Also provided are nuclease agents (e.g., targeting an endogenous ALB locus) or nucleic acids encoding nuclease agents to facilitate integration of the nucleic acid constructs into a target genomic locus such as an endogenous ALB locus.

### A. Multidomain Therapeutic Proteins and Nucleic Acid Constructs Encoding a Multidomain Therapeutic Protein

[0135] The compositions and methods described herein include the use of multidomain therapeutic proteins comprising an acid sphingomyelinase (ASM) polypeptide (ASM or a biologically active portion thereof, to provide ASM enzyme replacement activity) linked to or fused to a TfR-binding delivery domain. The compositions and methods described herein also include the use of a nucleic acid construct that comprises a coding sequence for a multidomain therapeutic protein. The compositions and methods described herein can also include the use of a nucleic acid construct that comprises a multidomain therapeutic protein coding sequence or a reverse complement of the multidomain therapeutic protein coding sequence. Such nucleic acid constructs can be for expression of the multidomain therapeutic protein in a cell. Such nucleic acid constructs can be for insertion into a target genomic locus or into a cleavage site created by a nuclease agent or CRISPR/Cas system as disclosed elsewhere herein. The term cleavage site includes a DNA sequence at which a nick or double-strand break is created by a nuclease agent (e.g., a Cas9 protein complexed with a guide RNA). In some embodiments, a double-stranded break is created by a Cas9 protein complexed with a guide RNA, e.g., a Spy Cas9 protein complexed with a Spy Cas9 guide RNA.

[0136] The length of the nucleic acid constructs disclosed herein can vary. The construct can be, for example, from about 1 kb to about 5 kb, such as from about 1 kb to about 4.5 kb or about 1 kb to about 4 kb. An exemplary nucleic acid construct is between about 1 kb to about 5 kb in length or between about 1 kb to about 4 kb in length. Alternatively, a nucleic acid construct can be between about 1 kb to about 1.5 kb, about 1.5 kb to about 2 kb, about 2 kb to about 2.5 kb, about 2.5 kb to about 3 kb, about 3 kb to about 3.5 kb, about 3.5 kb to about 4 kb, about 4 kb to about 4.5 kb, or about 4.5 kb to about 5 kb in length. Alternatively, a nucleic acid construct can be, for example, no more than 5 kb, no more than 4.5 kb, no more than 4 kb, no more than 3.5 kb, no more than 3 kb, or no more than 2.5 kb in length.

[0137] The constructs can comprise deoxyribonucleic acid (DNA) or ribonucleic acid (RNA), can be single-stranded, double-stranded, or partially single-stranded and partially double-stranded, and can be introduced into a host cell in linear or circular (e.g., minicircle) form. See, e.g., US 2010/0047805, US 2011/0281361, and US 2011/0207221, each of which is herein incorporated by reference in their entirety for all purposes. If introduced in linear form, the ends of the construct can be protected (e.g., from exonucleolytic degradation) by known methods. For example, one or more dideoxynucleotide residues can be added to the 3′ terminus of a linear molecule and/or self-complementary oligonucleotides can be ligated to one or both ends. See, e.g., Chang et al. (1987) Proc. Natl. Acad. Sci. U.S.A. 84:4959-4963 and Nehls et al. (1996) Science 272:886-889, each of which is herein incorporated by reference in their entirety for all purposes. Additional methods for protecting exogenous polynucleotides from degradation include, but are not limited to, addition of terminal amino group(s) and the use of modified internucleotide linkages such as, for example, phosphorothioates, phosphoramidates, and O-methyl ribose or deoxyribose residues. A construct can be introduced into a cell as part of a vector molecule having additional sequences such as, for example, replication origins, promoters, and genes encoding antibiotic resistance. A construct may omit viral elements. Moreover, constructs can be introduced as a naked nucleic acid, can be introduced as a nucleic acid complexed with an agent such as a liposome or poloxamer, or can be delivered by viruses (e.g., adenovirus, adeno-associated virus (AAV), herpesvirus, retrovirus, or lentivirus).

[0138] The constructs disclosed herein can be modified on either or both ends to include one or more suitable structural features as needed and/or to confer one or more functional benefit. For example, structural modifications can vary depending on the method(s) used to deliver the constructs disclosed herein to a host cell (e.g., use of viral vector delivery or packaging into lipid nanoparticles for delivery). Such modifications include, for example, terminal structures such as inverted terminal repeats (ITR), hairpin, loops, and other structures such as toroids. For example, the constructs disclosed herein can comprise one, two, or three ITRs or can comprise no more than two ITRs. Various methods of structural modifications are known.

[0139] Some constructs may be inserted so that their expression is driven by the endogenous promoter at the insertion site (e.g., the endogenous ALB promoter when the construct is integrated into the host cell's ALB locus). Such constructs may not comprise a promoter that drives the expression of the multidomain therapeutic protein. For example, the expression of the multidomain therapeutic protein can be driven by a promoter of the host cell (e.g., the endogenous ALB promoter when the transgene is integrated into a host cell's ALB locus). In such cases, the construct may lack control elements (e.g., promoter and/or enhancer) that drive its expression (e.g., a promoterless construct). In other cases, the construct may comprise a promoter and/or enhancer, for example a constitutive promoter or an inducible or tissue-specific (e.g., liver- or platelet-specific) promoter that drives expression of the multidomain therapeutic protein in an episome or upon integration. For example, the construct may be a construct for expression (e.g., an episomal construct) but not for insertion. In some embodiments, the construct is not for insertion. Non-limiting exemplary constitutive promoters include cytomegalovirus immediate early promoter (CMV), simian virus (SV40) promoter, adenovirus major late (MLP) promoter, Rous sarcoma virus (RSV) promoter, mouse mammary tumor virus (MMTV) promoter, phosphoglycerate kinase (PGK) promoter, elongation factor-alpha (EFla) promoter, ubiquitin promoters, actin promoters, tubulin promoters, immunoglobulin promoters, a functional fragment thereof, or a combination of any of the foregoing. For example, the promoter may be a CMV promoter or a truncated CMV promoter. In another example, the promoter may be an EFla promoter. Non-limiting exemplary inducible promoters include those inducible by heat shock, light, chemicals, peptides, metals, steroids, antibiotics, or alcohol. The inducible promoter may be one that has a low basal (non-induced) expression level, such as the Tet-On® promoter (Clontech). Although not required for expression, the constructs may comprise transcriptional or translational regulatory sequences such as promoters, enhancers, insulators, internal ribosome entry sites, additional sequences encoding peptides, and/or polyadenylation signals. The construct may comprise a sequence encoding a multidomain therapeutic protein downstream of and operably linked to a signal sequence encoding a signal peptide. In some examples, the nucleic acid construct works in homology-independent insertion of a nucleic acid that encodes a multidomain therapeutic protein. Such nucleic acid constructs can work, for example, in non-dividing cells (e.g., cells in which non-homologous end joining (NHEJ), not homologous recombination (HR), is the primary mechanism by which double-stranded DNA breaks are repaired) or dividing cells (e.g., actively dividing cells). Such constructs can be, for example, homology-independent donor constructs. In preferred embodiments, promoters and other regulatory sequences are appropriate for use in humans, e.g., recognized by regulatory factors in human cells, e.g., in human liver cells, and acceptable to regulatory authorities for use in humans. Examples of liver-specific promoters include TTR promoters, such as human or mouse TTR promoters. In one example, the construct may comprise a TTR promoter, such as a mouse TTR promoter or a human TTR promoter (e.g., the coding sequence for the multidomain therapeutic protein is operably linked to the TTR promoter). In one example, the construct may comprise a SERPINA1 enhancer, such as a mouse SERPINA1 enhancer or a human SERPINA1 enhancer (e.g., the coding sequence for the multidomain therapeutic protein is operably linked to the SERPINA1 enhancer). In one example, the construct may comprise a TTR promoter and a SERPINA1 enhancer, such as a human SERPINA1 enhancer and a mouse TTR promoter (e.g., the coding sequence for the multidomain therapeutic protein is operably linked to the SERPINA1 enhancer and the TTR promoter).

[0140] The constructs disclosed herein can be modified to include or exclude any suitable structural feature as needed for any particular use and/or that confers one or more desired function. For example, some constructs disclosed herein do not comprise a homology arm. Some constructs disclosed herein are capable of insertion into a target genomic locus or a cut site in a target DNA sequence for a nuclease agent (e.g., capable of insertion into a safe harbor gene, such as an ALB locus) by non-homologous end joining. For example, such constructs can be inserted into a blunt end double-strand break following cleavage with a nuclease agent (e.g., CRISPR/Cas system, e.g., a SpyCas9 CRISPR/Cas system) as disclosed herein. In a specific example, the construct can be delivered via AAV and can be capable of insertion by non-homologous end joining (e.g., the construct does not comprise a homology arm).

[0141] In a particular example, the construct can be inserted via homology-independent targeted integration. For example, the multidomain therapeutic protein coding sequence in the construct can be flanked on each side by a target site for a nuclease agent (e.g., the same target site as in the target DNA sequence for targeted insertion (e.g., in a safe harbor gene), and the same nuclease agent being used to cleave the target DNA sequence for targeted insertion). The nuclease agent can then cleave the target sites flanking the multidomain therapeutic protein. In a specific example, the construct is delivered AAV-mediated delivery, and cleavage of the target sites flanking the multidomain therapeutic protein coding sequence can remove the inverted terminal repeats (ITRs) of the AAV. In some instances, the target DNA sequence for targeted insertion (e.g., target DNA sequence in a safe harbor locus such as a gRNA target sequence including the flanking protospacer adjacent motif) is no longer present if the multidomain therapeutic protein coding sequence is inserted into the cut site or target DNA sequence in the correct orientation but it is reformed if the multidomain therapeutic protein coding sequence is inserted into the cut site or target DNA sequence in the opposite orientation. This can help ensure that the multidomain therapeutic protein coding sequence) is inserted in the correct orientation for expression.

[0142] The constructs disclosed herein can comprise a polyadenylation sequence or polyadenylation tail sequence (e.g., downstream or 3′ of a multidomain therapeutic protein coding sequence). Methods of designing a suitable polyadenylation tail sequence are well-known. The polyadenylation tail sequence can be encoded, for example, as a “poly-A” stretch downstream of the multidomain therapeutic protein coding sequence. A poly-A tail can comprise, for example, at least 20, 30, 40, 50, 60, 70, 80, 90, or 100 adenines, and optionally up to 300 adenines. In a specific example, the poly-A tail comprises 95, 96, 97, 98, 99, or 100 adenine nucleotides. Methods of designing a suitable polyadenylation tail sequence and/or polyadenylation signal sequence are well known. For example, the polyadenylation signal sequence AAUAAA is commonly used in mammalian systems, although variants such as UAUAAA or AU/GUAAA have been identified. See, e.g., Proudfoot (2011) Genes & Dev. 25(17):1770-82, herein incorporated by reference in its entirety for all purposes. The term polyadenylation signal sequence refers to any sequence that directs termination of transcription and addition of a poly-A tail to the mRNA transcript. In eukaryotes, transcription terminators are recognized by protein factors, and termination is followed by polyadenylation, a process of adding a poly(A) tail to the mRNA transcripts in presence of the poly(A) polymerase. The mammalian poly(A) signal typically consists of a core sequence, about 45 nucleotides long, that may be flanked by diverse auxiliary sequences that serve to enhance cleavage and polyadenylation efficiency. The core sequence consists of a highly conserved upstream element (AATAAA or AAUAAA) in the mRNA, referred to as a poly A recognition motif or poly A recognition sequence), recognized by cleavage and polyadenylation-specificity factor (CPSF), and a poorly defined downstream region (rich in Us or Gs and Us), bound by cleavage stimulation factor (CstF). Examples of transcription terminators that can be used include, for example, the human growth hormone (HGH) polyadenylation signal, the simian virus 40 (SV40) late polyadenylation signal, the rabbit beta-globin polyadenylation signal, the bovine growth hormone (BGH) polyadenylation signal, the phosphoglycerate kinase (PGK) polyadenylation signal, an AOX1 transcription termination sequence, a CYC1 transcription termination sequence, or any transcription termination sequence known to be suitable for regulating gene expression in eukaryotic cells. In one example, the polyadenylation signal is a simian virus 40 (SV40) late polyadenylation signal. For example, the polyadenylation signal can comprise, consist essentially of, or consist of SEQ ID NO: 615, 169, or 161. For example, the polyadenylation signal can comprise, consist essentially of, or consist of SEQ ID NO: 169 or 161. For example, the polyadenylation signal can comprise, consist essentially of, or consist of SEQ ID NO: 169. For example, the polyadenylation signal can comprise, consist essentially of, or consist of SEQ ID NO: 615. In another example, the polyadenylation signal is a bovine growth hormone (BGH) polyadenylation signal or a CpG depleted BGH polyadenylation signal. For example, the polyadenylation signal can comprise, consist essentially of, or consist of SEQ ID NO: 162.

[0143] In one example, the polyadenylation signal can comprise a BGH polyadenylation signal. For example, the BGH polyadenylation signal can comprise, consist essentially of, or consist of SEQ ID NO: 797. In another example, the polyadenylation signal can comprise an SV40 polyadenylation signal. For example, the SV40 polyadenylation signal can be a unidirectional SV40 late polyadenylation signal. For example, the transcription terminator sequences that are present in the “early” inverse orientation of SV40 can be mutated (e.g., by mutating the reverse strand AAUAAA sequences to AAUCAA). The SV40 polyA is bidirectional, but the polyadenylation in the “late” orientation is more efficient than the polyadenylation in the “early” orientation. For example, the unidirectional SV40 late polyadenylation signal can comprise, consist essentially of, or consist of SEQ ID NO: 798. In another example, a synthetic polyadenylation signal can be used. For example, the synthetic polyadenylation signal can comprise, consist essentially of, or consist of SEQ ID NO: 799. In another example, two or more polyadenylation signals can be used in combination. For example, the polyadenylation signal can comprise a combination of a BGH polyadenylation signal and an SV40 polyadenylation signal (e.g., an SV40 late polyadenylation signal, such as a unidirectional SV40 late polyadenylation signal). For example, the polyadenylation signal can comprise a combination of a BGH polyadenylation signal and a unidirectional SV40 late polyadenylation signal. For example, the BGH polyadenylation signal can comprise, consist essentially of, or consist of SEQ ID NO: 797, and the unidirectional SV40 late polyadenylation signal can comprise, consist essentially of, or consist of SEQ ID NO: 798. In a specific example, the BGH polyadenylation signal can be upstream (5′) of the SV40 polyadenylation signal (e.g., unidirectional SV40 late polyadenylation signal). For example, the combined polyadenylation signal can comprise the sequence set forth in SEQ ID NO: 800. In another example, the polyadenylation signal can comprise a combination of a BGH polyadenylation signal and a synthetic polyadenylation signal. For example, the BGH polyadenylation signal can comprise, consist essentially of, or consist of SEQ ID NO: 797, and the synthetic polyadenylation signal can comprise, consist essentially of, or consist of SEQ ID NO: 799. In some embodiments, the nucleic acid construct is a unidirectional construct.

[0144] In some embodiments, a stuffer sequence can be used to increase the time between when RNA polymerase transcribes the polyA to the time when it transcribes the next splice acceptor. For example, the stuffer sequence can be used between two different polyadenylation signals (e.g., between a BGH polyadenylation signal and a synthetic polyadenylation signal. For example, the stuffer sequence can comprise, consist essentially of, or consist of SEQ ID NO: 801.

[0145] In some embodiments, MAZ elements that cause polymerase pausing are used in combination with a polyadenylation signal (e.g., a BGH polyadenylation signal or an SV40 polyadenylation signal). For example, one or more (e.g., at least 1, at least 2, at least 3, at least 4, or about 1 to about 4, about 2 to about 4, about 3 to about 4, or 1, 2, 3, or 4) MAZ elements can be used in combination with a polyadenylation signal. For example, the MAZ element can comprise, consist essentially of, or consist of SEQ ID NO: 802.

[0146] In some embodiments, unidirectional SV40 late polyadenylation signals are used. The SV40 polyA is bidirectional, but the polyadenylation in the “late” orientation is more efficient than the polyadenylation in the “early” orientation. The unidirectional SV40 late polyadenylation signals described herein are positioned in the “late” orientation, with the polyadenylation signals present in the “early” orientation mutated or inactivated. In some embodiments, each instance of the sequence AATAAA in the reverse strand is mutated in the unidirectional SV40 late polyadenylation signal. For example, the two conserved AATAAA poly(A) signals present in the SV40 “early” poly(A) to AATCAA. In some embodiments, the unidirectional SV40 late polyadenylation signal is at least 95%, at least 96%, at least 97%, at least 98%, or at least 99% identical to the sequence set forth in SEQ ID NO: 798. In some embodiments, the unidirectional SV40 late polyadenylation signal comprises, consists essentially of, or consists of the sequence set forth in SEQ ID NO: 798.

[0147] The unidirectional SV40 late polyadenylation signals can be used in combination with (e.g., in tandem with) one or more additional polyadenylation signals. Examples of transcription terminators that can be used include, for example, the human growth hormone (HGH) polyadenylation signal, the simian virus 40 (SV40) late polyadenylation signal, the rabbit beta-globin polyadenylation signal, the bovine growth hormone (BGH) polyadenylation signal, the phosphoglycerate kinase (PGK) polyadenylation signal, an AOX1 transcription termination sequence, a CYC1 transcription termination sequence, or any transcription termination sequence known to be suitable for regulating gene expression in eukaryotic cells. For example, the unidirectional SV40 late polyadenylation signals can be used in combination with (e.g., in tandem with) a bovine growth hormone (BGH) polyadenylation signal, optionally wherein the BGH polyadenylation signal is upstream of (5′ of) the unidirectional SV40 late polyadenylation signal. In some embodiments, the BGH polyadenylation signal is at least 95%, at least 96%, at least 97%, at least 98%, or at least 99% identical to the sequence set forth in SEQ ID NO: 797. In some embodiments, the BGH polyadenylation signal comprises, consists essentially of, or consists of the sequence set forth in SEQ ID NO: 797. In some embodiments, the combination of the BGH polyadenylation signal and the unidirectional SV40 late polyadenylation signal is at least 95%, at least 96%, at least 97%, at least 98%, or at least 99% identical to the sequence set forth in SEQ ID NO: 800. In some embodiments, the combination of the BGH polyadenylation signal and the unidirectional SV40 late polyadenylation signal comprises, consists essentially of, or consists of the sequence set forth in SEQ ID NO: 800.

[0148] In some embodiments, a stuffer sequence can be used to increase the time between when RNA polymerase transcribes the polyA to the time when it transcribes the next splice acceptor. For example, the stuffer sequence can be used between two different polyadenylation signals (e.g., between a BGH polyadenylation signal and a synthetic polyadenylation signal. For example, the stuffer sequence can comprise, consist essentially of, or consist of SEQ ID NO: 801.

[0149] In some embodiments, MAZ elements that cause polymerase pausing are used in combination with a polyadenylation signal (e.g., a BGH polyadenylation signal or an SV40 polyadenylation signal). For example, one or more (e.g., at least 1, at least 2, at least 3, at least 4, or about 1 to about 4, about 2 to about 4, about 3 to about 4, or 1, 2, 3, or 4) MAZ elements can be used in combination with a polyadenylation signal. For example, the MAZ element can comprise, consist essentially of, or consist of SEQ ID NO: 802.

[0150] The constructs disclosed herein may also comprise splice acceptor sites (e.g., operably linked to the multidomain therapeutic protein coding sequence, such as upstream or 5′ of the multidomain therapeutic protein coding sequence). The splice acceptor site can, for example, comprise NAG or consist of NAG. In a specific example, the splice acceptor is an ALB splice acceptor (e.g., an ALB splice acceptor used in the splicing together of exons 1 and 2 of ALB (i.e., ALB exon 2 splice acceptor)). For example, such a splice acceptor can be derived from the human ALB gene. In another example, the splice acceptor can be derived from the mouse Alb gene (e.g., an ALB splice acceptor used in the splicing together of exons 1 and 2 of mouse Alb (i.e., mouse Alb exon 2 splice acceptor)). In another example, the splice acceptor is a splice acceptor from a gene encoding the polypeptide of interest (e.g., an SMPD1 splice acceptor). For example, such a splice acceptor can be derived from the human SMPD1 gene. Alternatively, such a splice acceptor can be derived from the mouse SMPD1 gene. Additional suitable splice acceptor sites useful in eukaryotes, including artificial splice acceptors, are well-known. See, e.g., Shapiro et al. (1987) Nucleic Acids Res. 15:7155-7174 and Burset et al. (2001) Nucleic Acids Res. 29:255-259, each of which is herein incorporated by reference in its entirety for all purposes. In a specific example, the splice acceptor is a mouse Alb exon 2 splice acceptor. In a specific example, the splice acceptor can comprise, consist essentially of, or consist of SEQ ID NO: 163.

[0151] In some examples, the nucleic acid constructs disclosed herein can be bidirectional constructs, which are described in more detail below. In some examples, the nucleic acid constructs disclosed herein can be unidirectional constructs, which are described in more detail below. Likewise, in some examples, the nucleic acid constructs disclosed herein can be in a vector (e.g., viral vector, such as AAV, or rAAV8) and/or a lipid nanoparticle as described in more detail elsewhere herein.

### (1) Multidomain Therapeutic Proteins

[0152] A multidomain therapeutic protein as described herein includes an acid sphingomyelinase (ASM) polypeptide (ASM or a biologically active portion thereof, to provide ASM enzyme replacement activity) linked to or fused to a TfR-binding delivery domain. TfR-binding domains and ASM are described in more detail below. The TfR-binding domain provides binding to the internalization factor TfR. The multidomain therapeutic protein produced by the liver is targeted the muscle and CNS by targeting TfR, which is expressed in muscle and on brain endothelial cells. Transcytosis of TfR in these cells enables blood-brain-barrier crossing. In some multidomain therapeutic proteins, the TfR-binding delivery domain is covalently linked to the ASM. The covalent linkage may be any type of covalent bond (i.e., any bond that involved sharing of electrons). In some cases, the covalent bond is a peptide bond between two amino acids, such that the ASM and the TfR-binding delivery domain in whole or in part form a continuous polypeptide chain, as in a fusion protein. In some cases, the ASM portion and the TfR-binding delivery domain portion are directly linked. In other cases, a linker, such as a peptide linker, is used to tether the two portions. Any suitable linker can be used. See Chen et al., “Fusion protein linkers: property, design and functionality,” 65(10) Adv Drug Deliv Rev. 1357-69 (2013). In some cases, a cleavable linker is used. For example, a cathepsin cleavable linker can be inserted between the TfR-binding delivery domain and the ASM to facilitate removal of the TfR-binding delivery domain in the lysosome. In another example, the linker can comprise an amino acid sequence, e.g., about 10 amino acids in length, for example, 1, 2, 3, 4, 5, 6, 7, 8, 8, or 10 repeats of Gly₄Ser (SEQ ID NO: 537). In one example, the linker comprises, consists essentially of, or consists of three such repeats (SEQ ID NO: 616). For example, the coding sequence for the linker can comprise, consist essentially of, or consist of any one of SEQ ID NOS: 618-622 and 803. In another example, the linker comprises, consists essentially of, or consists of two such repeats (SEQ ID NO: 617). For example, the coding sequence for the linker can comprise, consist essentially of, or consist of any one of SEQ ID NOS: 623-629. In another example, the linker comprises, consists essentially of, or consists of one such repeat (SEQ ID NO: 537). For example, the coding sequence for the linker can comprise, consist essentially of, or consist of SEQ ID NO: 630 or 804. In another example, a rigid linker can be used such as a 2XH4 linker. In one example, the linker comprises, consists essentially of, or consists of AEAAAKEAAAKEAAAKEAAAKALEAEAAAKEAAAKEAAAKEAAAKA (SEQ ID NO: 808). For example, the coding sequence for the linker can comprise, consist essentially of, or consist of SEQ ID NO: 807.

[0153] In a particular multidomain therapeutic protein, the ASM (e.g., N-terminus) is covalently linked to the C-terminus of the heavy chain of an anti-TfR antibody or to the C-terminus of the light chain (i.e., the multidomain therapeutic protein is in the format of anti-TfR:ASM from N-terminus to C-terminus). In another particular multidomain therapeutic protein, the ASM is covalently linked to the N-terminus of the heavy chain of an anti-TfR antibody or to the N-terminus of the light chain (i.e., the multidomain therapeutic protein is in the format of ASM:anti-TfR from N-terminus to C-terminus). In another particular embodiment, the ASM (e.g., N-terminus) is linked to the C-terminus of an anti-TfR scFv domain (i.e., the multidomain therapeutic protein is in the format of anti-TfR-scFv:ASM, such as anti-TfR-scFv(V_{L}V_{H}):ASM from N-terminus to C-terminus). In another particular embodiment, the ASM (e.g., N-terminus) is linked to the C-terminus of an anti-TfR Fab heavy chain (i.e., the multi domain therapeutic protein is in the format of anti-TfR-Fab(LightHeavy):ASM from N-terminus to C-terminus). In another particular embodiment, the ASM (e.g., N-terminus) is linked to the C-terminus of an anti-TfR Fab light chain (i.e., the multi domain therapeutic protein is in the format of anti-TfR-Fab(HeavyLight):ASM from N-terminus to C-terminus).

### (a) Acid Sphingomyelinase (ASM)

[0154] Acid sphingomyelinase (ASM; sphingomyelin phosphodiesterase; aSMase; ASM; SMPD1) is encoded by SMPD1 (ASM). ASM is a lysosomal acid sphingomyelinase that converts sphingomyelin to ceramide. It also has phospholipase C activity. Defects in this gene are a cause of acid sphingomyelinase deficiency (ASMD), such as Niemann-Pick disease type A (NPA) and Niemann-Pick disease type B (NPB).

[0155] The ASM expressed from the compositions and methods disclosed herein can be any wild type or variant ASM. In one example, the ASM is a human ASM protein. The human SMPD1 gene (NCBI GeneID 6609) is located at 11, 11p15.4 on chromosome 11 (Assembly: GRCh38.p14 (GCF_000001405.40); Location: NC_000011.10 (6390474.6394996)). Human ASM is assigned UniProt reference number P17405. An exemplary amino acid sequence for human ASM is assigned NCBI Accession No. NP_000534.3 and is set forth in SEQ ID NO: 728 (signal peptide: 1-46; mature ASM: 47-631). An exemplary human ASM mRNA (cDNA) sequence is assigned NCBI Accession No. NM_000543.5 and is set forth in SEQ ID NO: 729. An exemplary human ASM coding sequence is assigned CCDS ID CCDS44531.1 and is set forth in SEQ ID NO: 730 (with stop codon removed). An exemplary mature human ASM (ASM(47-631)) amino acid sequence (i.e., the human ASM sequence after removal of the signal peptide) is set forth in SEQ ID NO: 731. An exemplary coding sequence for mature human ASM (ASM(47-631)) is set forth in SEQ ID NO: 734. Another exemplary coding sequence for mature human ASM (ASM(47-631)) is set forth in SEQ ID NO: 735. An exemplary amino acid sequence for a processed, secreted, intermediate form of human ASM (sASM) lacking the first 61 amino acids (ASM(62-631)) is set forth in SEQ ID NO: 733. An exemplary coding sequence for human ASM lacking the first 61 amino acids (ASM(62-631)) is set forth in SEQ ID NO: 732.

[0156] In some examples, the ASM (e.g., human ASM) is a wild type ASM (e.g., wild type human ASM) sequence or a biologically active portion or fragment thereof. For example, the ASM can lack the ASM signal peptide. For example, the ASM can be a fragment comprising the mature ASM amino acid sequence (i.e., the ASM sequence after removal of the signal peptide).

[0157] In a specific example, the ASM can comprise SEQ ID NO: 728 or can be at least 90%, at least 91%, at least 92%, at least 93%, at least 94%, at least 95%, at least 96%, at least 97%, at least 98%, at least 99%, or at least 99.5% identical to SEQ ID NO: 728. In another specific example, the ASM can consist essentially of SEQ ID NO: 728. In another specific example, the ASM can consist of SEQ ID NO: 728.

[0158] In a specific example, the ASM can comprise SEQ ID NO: 731 or can be at least 90%, at least 91%, at least 92%, at least 93%, at least 94%, at least 95%, at least 96%, at least 97%, at least 98%, at least 99%, or at least 99.5% identical to SEQ ID NO: 731. In another specific example, the ASM can consist essentially of SEQ ID NO: 731. In another specific example, the ASM can consist of SEQ ID NO: 731.

[0159] In a specific example, the ASM can comprise SEQ ID NO: 733 or can be at least 90%, at least 91%, at least 92%, at least 93%, at least 94%, at least 95%, at least 96%, at least 97%, at least 98%, at least 99%, or at least 99.5% identical to SEQ ID NO: 733. In another specific example, the ASM can consist essentially of SEQ ID NO: 733. In another specific example, the ASM can consist of SEQ ID NO: 733.

[0160] The ASM coding sequences in the constructs disclosed herein may include one or more modifications such as codon optimization (e.g., to human codons), depletion of CpG dinucleotides, mutation of cryptic splice sites, addition of one or more glycosylation sites, or any combination thereof. CpG dinucleotides in a construct can limit the therapeutic utility of the construct. First, unmethylated CpG dinucleotides can interact with host toll-like receptor-9 (TLR-9) to stimulate innate, proinflammatory immune responses. Second, once the CpG dinucleotides become methylated, they can result in the suppression of transgene expression coordinated by methyl-CpG binding proteins. Cryptic splice sites are sequences in a pre-messenger RNA that are not normally used as splice sites, but that can be activated, for example, by mutations that either inactivate canonical splice sites or create splice sites where one did not exist before. Accurate splice site selection is critical for successful gene expression, and removal of cryptic splice sites can favor use of the normal or intended splice site.

[0161] In one example, an ASM coding sequence in a construct disclosed herein has one or more cryptic splice sites mutated or removed. In another example, an ASM coding sequence in a construct disclosed herein has all identified cryptic splice sites mutated or removed. In another example, an ASM coding sequence in a construct disclosed herein has one or more CpG dinucleotides removed (i.e., is CpG depleted). In another example, an ASM coding sequence in a construct disclosed herein has all CpG dinucleotides removed (i.e., is fully CpG depleted). In another example, an ASM coding sequence in a construct disclosed herein is codon optimized (e.g., codon optimized for expression in a human or mammal). In a specific example, an ASM coding sequence in a construct disclosed herein has one or more CpG dinucleotides removed (i.e., is CpG depleted) and has one or more cryptic splice sites mutated or removed. In another specific example, an ASM coding sequence in a construct disclosed herein has all CpG dinucleotides removed and has one or more or all identified cryptic splice sites mutated or removed. In another specific example, an ASM coding sequence in a construct disclosed herein has one or more CpG dinucleotides removed (i.e., is CpG depleted) and is codon optimized (e.g., codon optimized for expression in a human or mammal). In another specific example, an ASM coding sequence in a construct disclosed herein has all CpG dinucleotides removed (i.e., is fully CpG depleted) and is codon optimized (e.g., codon optimized for expression in a human or mammal).

[0162] Various ASM coding sequences are provided. In one example, the ASM coding sequence is (or comprises a sequence) at least 90%, at least 91%, at least 92%, at least 93%, at least 94%, at least 95%, at least 96%, at least 97%, at least 98%, at least 99%, at least 99.5%, or 100% identical to an SEQ ID NO: 730. In another example, the ASM coding sequence is (or comprises a sequence) at least 95%, at least 96%, at least 97%, at least 98%, at least 99%, at least 99.5%, or 100% identical to SEQ ID NO: 730. In another example, the ASM coding sequence is (or comprises a sequence) at least 99%, at least 99.5%, or 100% identical to SEQ ID NO: 730. In another example, the ASM coding sequence comprises the sequence set forth in SEQ ID NO: 730. In another example, the ASM coding sequence consists essentially of the sequence set forth in SEQ ID NO: 730. In another example, the ASM coding sequence consists of the sequence set forth in SEQ ID NO: 730. Optionally, the ASM coding sequence encodes an ASM protein (or an ASM protein comprising a sequence) at least 90%, at least 91%, at least 92%, at least 93%, at least 94%, at least 95%, at least 96%, at least 97%, at least 98%, at least 99%, at least 99.5%, or 100% identical to SEQ ID NO: 728 (and, e.g., retaining the activity of native ASM). Optionally, the ASM coding sequence encodes an ASM protein (or an ASM protein comprising a sequence) at least 95%, at least 96%, at least 97%, at least 98%, at least 99%, at least 99.5%, or 100% identical to SEQ ID NO: 728 (and, e.g., retaining the activity of native ASM). Optionally, the ASM coding sequence in the above examples encodes an ASM protein (or an ASM protein comprising a sequence) at least 99%, at least 99.5%, or 100% identical to SEQ ID NO: 728 (and, e.g., retaining the activity of native ASM). Optionally, the ASM coding sequence in the above examples encodes an ASM protein comprising the sequence set forth in SEQ ID NO: 728. Optionally, the ASM coding sequence in the above examples encodes an ASM protein consisting essentially of the sequence set forth in SEQ ID NO: 728. Optionally, the ASM coding sequence in the above examples encodes an ASM protein consisting of the sequence set forth in SEQ ID NO: 728.

[0163] In one example, the ASM coding sequence is (or comprises a sequence) at least 90%, at least 91%, at least 92%, at least 93%, at least 94%, at least 95%, at least 96%, at least 97%, at least 98%, at least 99%, at least 99.5%, or 100% identical to SEQ ID NO: 730. In another example, the ASM coding sequence is (or comprises a sequence) at least 90%, at least 91%, at least 92%, at least 93%, at least 94%, at least 95%, at least 96%, at least 97%, at least 98%, at least 99%, at least 99.5%, or 100% identical to SEQ ID NO: 730 and encodes an ASM protein (or an ASM protein comprising a sequence) at least 99%, at least 99.5%, or 100% identical to SEQ ID NO: 728. In another example, the ASM coding sequence is (or comprises a sequence) at least 90%, at least 91%, at least 92%, at least 93%, at least 94%, at least 95%, at least 96%, at least 97%, at least 98%, at least 99%, at least 99.5%, or 100% identical to SEQ ID NO: 730 and encodes an ASM protein comprising the sequence set forth in SEQ ID NO: 728. In another example, the ASM coding sequence is (or comprises a sequence) at least 95%, at least 96%, at least 97%, at least 98%, at least 99%, at least 99.5%, or 100% identical to SEQ ID NO: 730. In another example, the ASM coding sequence is (or comprises a sequence) at least 95%, at least 96%, at least 97%, at least 98%, at least 99%, at least 99.5%, or 100% identical to SEQ ID NO: 730 and encodes an ASM protein (or an ASM protein comprising a sequence) at least 99%, at least 99.5%, or 100% identical to SEQ ID NO: 728. In another example, the ASM coding sequence is (or comprises a sequence) at least 95%, at least 96%, at least 97%, at least 98%, at least 99%, at least 99.5%, or 100% identical to SEQ ID NO: 730 and encodes an ASM protein comprising the sequence set forth in SEQ ID NO: 728. In another example, the ASM coding sequence is (or comprises a sequence) at least 99%, at least 99.5%, or 100% identical to SEQ ID NO: 730. In another example, the ASM coding sequence is (or comprises a sequence) at least 99%, at least 99.5%, or 100% identical to SEQ ID NO: 730 and encodes an ASM protein (or an ASM protein comprising a sequence) at least 99%, at least 99.5%, or 100% identical to SEQ ID NO: 728. In another example, the ASM coding sequence is (or comprises a sequence) at least 99%, at least 99.5%, or 100% identical to SEQ ID NO: 730 and encodes an ASM protein comprising the sequence set forth in SEQ ID NO: 728. In another example, the ASM coding sequence comprises the sequence set forth in SEQ ID NO: 730. In another example, the ASM coding sequence consists essentially of the sequence set forth in SEQ ID NO: 730. In another example, the ASM coding sequence consists of the sequence set forth in SEQ ID NO: 730. The ASM coding sequence can be, for example, CpG-depleted (e.g., fully CpG-depleted) and/or codon optimized. For example, the ASM coding sequence can be CpG depleted (e.g., fully CpG-depleted) and codon optimized. Optionally, the ASM coding sequence encodes an ASM protein (or an ASM protein comprising a sequence) at least 90%, at least 91%, at least 92%, at least 93%, at least 94%, at least 95%, at least 96%, at least 97%, at least 98%, at least 99%, at least 99.5%, or 100% identical to SEQ ID NO: 728 (and, e.g., retaining the activity of native ASM). Optionally, the ASM coding sequence encodes an ASM protein (or an ASM protein comprising a sequence) at least 95%, at least 96%, at least 97%, at least 98%, at least 99%, at least 99.5%, or 100% identical to SEQ ID NO: 728 (and, e.g., retaining the activity of native ASM). Optionally, the ASM coding sequence in the above examples encodes an ASM protein (or an ASM protein comprising a sequence) at least 99%, at least 99.5%, or 100% identical to SEQ ID NO: 728 (and, e.g., retaining the activity of native ASM). Optionally, the ASM coding sequence in the above examples encodes an ASM protein comprising the sequence set forth in SEQ ID NO: 728. Optionally, the ASM coding sequence in the above examples encodes an ASM protein consisting essentially of the sequence set forth in SEQ ID NO: 728. Optionally, the ASM coding sequence in the above examples encodes an ASM protein consisting of the sequence set forth in SEQ ID NO: 728.

[0164] Various ASM coding sequences are provided. In one example, the ASM coding sequence is (or comprises a sequence) at least 90%, at least 91%, at least 92%, at least 93%, at least 94%, at least 95%, at least 96%, at least 97%, at least 98%, at least 99%, at least 99.5%, or 100% identical to an SEQ ID NO: 732. In another example, the ASM coding sequence is (or comprises a sequence) at least 95%, at least 96%, at least 97%, at least 98%, at least 99%, at least 99.5%, or 100% identical to SEQ ID NO: 732. In another example, the ASM coding sequence is (or comprises a sequence) at least 99%, at least 99.5%, or 100% identical to SEQ ID NO: 732. In another example, the ASM coding sequence comprises the sequence set forth in SEQ ID NO: 732. In another example, the ASM coding sequence consists essentially of the sequence set forth in SEQ ID NO: 732. In another example, the ASM coding sequence consists of the sequence set forth in SEQ ID NO: 732. Optionally, the ASM coding sequence encodes an ASM protein (or an ASM protein comprising a sequence) at least 90%, at least 91%, at least 92%, at least 93%, at least 94%, at least 95%, at least 96%, at least 97%, at least 98%, at least 99%, at least 99.5%, or 100% identical to SEQ ID NO: 733 (and, e.g., retaining the activity of native ASM). Optionally, the ASM coding sequence encodes an ASM protein (or an ASM protein comprising a sequence) at least 95%, at least 96%, at least 97%, at least 98%, at least 99%, at least 99.5%, or 100% identical to SEQ ID NO: 733 (and, e.g., retaining the activity of native ASM). Optionally, the ASM coding sequence in the above examples encodes an ASM protein (or an ASM protein comprising a sequence) at least 99%, at least 99.5%, or 100% identical to SEQ ID NO: 733 (and, e.g., retaining the activity of native ASM). Optionally, the ASM coding sequence in the above examples encodes an ASM protein comprising the sequence set forth in SEQ ID NO: 733. Optionally, the ASM coding sequence in the above examples encodes an ASM protein consisting essentially of the sequence set forth in SEQ ID NO: 733. Optionally, the ASM coding sequence in the above examples encodes an ASM protein consisting of the sequence set forth in SEQ ID NO: 733.

[0165] In one example, the ASM coding sequence is (or comprises a sequence) at least 90%, at least 91%, at least 92%, at least 93%, at least 94%, at least 95%, at least 96%, at least 97%, at least 98%, at least 99%, at least 99.5%, or 100% identical to SEQ ID NO: 732. In another example, the ASM coding sequence is (or comprises a sequence) at least 90%, at least 91%, at least 92%, at least 93%, at least 94%, at least 95%, at least 96%, at least 97%, at least 98%, at least 99%, at least 99.5%, or 100% identical to SEQ ID NO: 732 and encodes an ASM protein (or an ASM protein comprising a sequence) at least 99%, at least 99.5%, or 100% identical to SEQ ID NO: 733. In another example, the ASM coding sequence is (or comprises a sequence) at least 90%, at least 91%, at least 92%, at least 93%, at least 94%, at least 95%, at least 96%, at least 97%, at least 98%, at least 99%, at least 99.5%, or 100% identical to SEQ ID NO: 732 and encodes an ASM protein comprising the sequence set forth in SEQ ID NO: 733. In another example, the ASM coding sequence is (or comprises a sequence) at least 95%, at least 96%, at least 97%, at least 98%, at least 99%, at least 99.5%, or 100% identical to SEQ ID NO: 732. In another example, the ASM coding sequence is (or comprises a sequence) at least 95%, at least 96%, at least 97%, at least 98%, at least 99%, at least 99.5%, or 100% identical to SEQ ID NO: 732 and encodes an ASM protein (or an ASM protein comprising a sequence) at least 99%, at least 99.5%, or 100% identical to SEQ ID NO: 733. In another example, the ASM coding sequence is (or comprises a sequence) at least 95%, at least 96%, at least 97%, at least 98%, at least 99%, at least 99.5%, or 100% identical to SEQ ID NO: 732 and encodes an ASM protein comprising the sequence set forth in SEQ ID NO: 733. In another example, the ASM coding sequence is (or comprises a sequence) at least 99%, at least 99.5%, or 100% identical to SEQ ID NO: 732. In another example, the ASM coding sequence is (or comprises a sequence) at least 99%, at least 99.5%, or 100% identical to SEQ ID NO: 732 and encodes an ASM protein (or an ASM protein comprising a sequence) at least 99%, at least 99.5%, or 100% identical to SEQ ID NO: 733. In another example, the ASM coding sequence is (or comprises a sequence) at least 99%, at least 99.5%, or 100% identical to SEQ ID NO: 732 and encodes an ASM protein comprising the sequence set forth in SEQ ID NO: 733. In another example, the ASM coding sequence comprises the sequence set forth in SEQ ID NO: 732. In another example, the ASM coding sequence consists essentially of the sequence set forth in SEQ ID NO: 732. In another example, the ASM coding sequence consists of the sequence set forth in SEQ ID NO: 732. The ASM coding sequence can be, for example, CpG-depleted (e.g., fully CpG-depleted) and/or codon optimized. For example, the ASM coding sequence can be CpG depleted (e.g., fully CpG-depleted) and codon optimized. Optionally, the ASM coding sequence encodes an ASM protein (or an ASM protein comprising a sequence) at least 90%, at least 91%, at least 92%, at least 93%, at least 94%, at least 95%, at least 96%, at least 97%, at least 98%, at least 99%, at least 99.5%, or 100% identical to SEQ ID NO: 733 (and, e.g., retaining the activity of native ASM). Optionally, the ASM coding sequence encodes an ASM protein (or an ASM protein comprising a sequence) at least 95%, at least 96%, at least 97%, at least 98%, at least 99%, at least 99.5%, or 100% identical to SEQ ID NO: 733 (and, e.g., retaining the activity of native ASM). Optionally, the ASM coding sequence in the above examples encodes an ASM protein (or an ASM protein comprising a sequence) at least 99%, at least 99.5%, or 100% identical to SEQ ID NO: 733 (and, e.g., retaining the activity of native ASM). Optionally, the ASM coding sequence in the above examples encodes an ASM protein comprising the sequence set forth in SEQ ID NO: 733. Optionally, the ASM coding sequence in the above examples encodes an ASM protein consisting essentially of the sequence set forth in SEQ ID NO: 733. Optionally, the ASM coding sequence in the above examples encodes an ASM protein consisting of the sequence set forth in SEQ ID NO: 733.

[0166] Various ASM coding sequences are provided. In one example, the ASM coding sequence is (or comprises a sequence) at least 90%, at least 91%, at least 92%, at least 93%, at least 94%, at least 95%, at least 96%, at least 97%, at least 98%, at least 99%, at least 99.5%, or 100% identical to an SEQ ID NO: 734 or 735. In another example, the ASM coding sequence is (or comprises a sequence) at least 95%, at least 96%, at least 97%, at least 98%, at least 99%, at least 99.5%, or 100% identical to SEQ ID NO: 734 or 735. In another example, the ASM coding sequence is (or comprises a sequence) at least 99%, at least 99.5%, or 100% identical to SEQ ID NO: 734 or 735. In another example, the ASM coding sequence comprises the sequence set forth in SEQ ID NO: 734 or 735. In another example, the ASM coding sequence consists essentially of the sequence set forth in SEQ ID NO: 734 or 735. In another example, the ASM coding sequence consists of the sequence set forth in SEQ ID NO: 734 or 735. Optionally, the ASM coding sequence encodes an ASM protein (or an ASM protein comprising a sequence) at least 90%, at least 91%, at least 92%, at least 93%, at least 94%, at least 95%, at least 96%, at least 97%, at least 98%, at least 99%, at least 99.5%, or 100% identical to SEQ ID NO: 731 (and, e.g., retaining the activity of native ASM). Optionally, the ASM coding sequence encodes an ASM protein (or an ASM protein comprising a sequence) at least 95%, at least 96%, at least 97%, at least 98%, at least 99%, at least 99.5%, or 100% identical to SEQ ID NO: 731 (and, e.g., retaining the activity of native ASM). Optionally, the ASM coding sequence in the above examples encodes an ASM protein (or an ASM protein comprising a sequence) at least 99%, at least 99.5%, or 100% identical to SEQ ID NO: 731 (and, e.g., retaining the activity of native ASM). Optionally, the ASM coding sequence in the above examples encodes an ASM protein comprising the sequence set forth in SEQ ID NO: 731. Optionally, the ASM coding sequence in the above examples encodes an ASM protein consisting essentially of the sequence set forth in SEQ ID NO: 731. Optionally, the ASM coding sequence in the above examples encodes an ASM protein consisting of the sequence set forth in SEQ ID NO: 731.

[0167] In one example, the ASM coding sequence is (or comprises a sequence) at least 90%, at least 91%, at least 92%, at least 93%, at least 94%, at least 95%, at least 96%, at least 97%, at least 98%, at least 99%, at least 99.5%, or 100% identical to SEQ ID NO: 734 or 735. In another example, the ASM coding sequence is (or comprises a sequence) at least 90%, at least 91%, at least 92%, at least 93%, at least 94%, at least 95%, at least 96%, at least 97%, at least 98%, at least 99%, at least 99.5%, or 100% identical to SEQ ID NO: 734 or 735 and encodes an ASM protein (or an ASM protein comprising a sequence) at least 99%, at least 99.5%, or 100% identical to SEQ ID NO: 731. In another example, the ASM coding sequence is (or comprises a sequence) at least 90%, at least 91%, at least 92%, at least 93%, at least 94%, at least 95%, at least 96%, at least 97%, at least 98%, at least 99%, at least 99.5%, or 100% identical to SEQ ID NO: 734 or 735 and encodes an ASM protein comprising the sequence set forth in SEQ ID NO: 731. In another example, the ASM coding sequence is (or comprises a sequence) at least 95%, at least 96%, at least 97%, at least 98%, at least 99%, at least 99.5%, or 100% identical to SEQ ID NO: 734 or 735. In another example, the ASM coding sequence is (or comprises a sequence) at least 95%, at least 96%, at least 97%, at least 98%, at least 99%, at least 99.5%, or 100% identical to SEQ ID NO: 734 or 735 and encodes an ASM protein (or an ASM protein comprising a sequence) at least 99%, at least 99.5%, or 100% identical to SEQ ID NO: 731. In another example, the ASM coding sequence is (or comprises a sequence) at least 95%, at least 96%, at least 97%, at least 98%, at least 99%, at least 99.5%, or 100% identical to SEQ ID NO: 734 or 735 and encodes an ASM protein comprising the sequence set forth in SEQ ID NO: 731. In another example, the ASM coding sequence is (or comprises a sequence) at least 99%, at least 99.5%, or 100% identical to SEQ ID NO: 734 or 735. In another example, the ASM coding sequence is (or comprises a sequence) at least 99%, at least 99.5%, or 100% identical to SEQ ID NO: 734 or 735 and encodes an ASM protein (or an ASM protein comprising a sequence) at least 99%, at least 99.5%, or 100% identical to SEQ ID NO: 731. In another example, the ASM coding sequence is (or comprises a sequence) at least 99%, at least 99.5%, or 100% identical to SEQ ID NO: 734 or 735 and encodes an ASM protein comprising the sequence set forth in SEQ ID NO: 731. In another example, the ASM coding sequence comprises the sequence set forth in SEQ ID NO: 734 or 735. In another example, the ASM coding sequence consists essentially of the sequence set forth in SEQ ID NO: 734 or 735. In another example, the ASM coding sequence consists of the sequence set forth in SEQ ID NO: 734 or 735. The ASM coding sequence can be, for example, CpG-depleted (e.g., fully CpG-depleted) and/or codon optimized. For example, the ASM coding sequence can be CpG depleted (e.g., fully CpG-depleted) and codon optimized. Optionally, the ASM coding sequence encodes an ASM protein (or an ASM protein comprising a sequence) at least 90%, at least 91%, at least 92%, at least 93%, at least 94%, at least 95%, at least 96%, at least 97%, at least 98%, at least 99%, at least 99.5%, or 100% identical to SEQ ID NO: 733 (and, e.g., retaining the activity of native ASM). Optionally, the ASM coding sequence encodes an ASM protein (or an ASM protein comprising a sequence) at least 95%, at least 96%, at least 97%, at least 98%, at least 99%, at least 99.5%, or 100% identical to SEQ ID NO: 731 (and, e.g., retaining the activity of native ASM). Optionally, the ASM coding sequence in the above examples encodes an ASM protein (or an ASM protein comprising a sequence) at least 99%, at least 99.5%, or 100% identical to SEQ ID NO: 731 (and, e.g., retaining the activity of native ASM). Optionally, the ASM coding sequence in the above examples encodes an ASM protein comprising the sequence set forth in SEQ ID NO: 731. Optionally, the ASM coding sequence in the above examples encodes an ASM protein consisting essentially of the sequence set forth in SEQ ID NO: 731. Optionally, the ASM coding sequence in the above examples encodes an ASM protein consisting of the sequence set forth in SEQ ID NO: 731.

[0168] When specific ASM or multidomain therapeutic protein nucleic acid constructs sequences are disclosed herein, they are meant to encompass the sequence disclosed or the reverse complement of the sequence. For example, if an ASM or multidomain therapeutic protein nucleic acid construct disclosed herein consists of the hypothetical sequence 5′-CTGGACCGA-3′, it is also meant to encompass the reverse complement of that sequence (5′-TCGGTCCAG-3′). Likewise, when construct elements are disclosed herein in a specific 5′ to 3′ order, they are also meant to encompass the reverse complement of the order of those elements. One reason for this is that, in many embodiments disclosed herein, the ASM or multidomain therapeutic protein nucleic acid constructs are part of a single-stranded recombinant AAV vector. Single-stranded AAV genomes are packaged as either sense (plus-stranded) or anti-sense (minus-stranded genomes), and single-stranded AAV genomes of + and − polarity are packaged with equal frequency into mature rAAV virions. See, e.g., LING et al. (2015) J. Mol. Genet. Med. 9(3):175, Zhou et al. (2008) Mol. Ther. 16(3):494-499, and Samulski et al. (1987) J. Virol. 61:3096-3101, each of which is herein incorporated by reference in its entirety for all purposes.

### (b) TfR-Binding Delivery Domain

[0169] The multidomain therapeutic proteins disclosed herein can comprise a TfR-binding delivery domain fused to an ASM polypeptide. The TfR-binding domain provides binding to the internalization factor transferrin receptor protein 1(TfR; UniProt Ref. P02786). TfR (also known as TR, TfR1, and Trfr) is encoded by the TFRC gene. TfR is expressed in muscle and on brain endothelial cells. Transcytosis of TfR in these cells enables blood-brain-barrier crossing. In some embodiments, the multidomain therapeutic proteins comprising a TfR-binding delivery domain (e.g., scFv) fused to an ASM do not alter transferrin uptake. In some embodiments, the multidomain therapeutic proteins comprising a TfR-binding delivery domain (e.g., scFv) fused to an ASM do not alter iron homeostasis. In some embodiments, the multidomain therapeutic proteins comprising a TfR-binding delivery domain (e.g., scFv) fused to an ASM do not alter transferrin uptake or iron homeostasis.

[0170] Transferrin receptor 1 (TfR) is a membrane receptor involved in the control of iron supply to the cell through the binding of transferrin, the major iron-carrier protein. Transferrin receptor 1 is expressed from the TFRC gene. Transferrin receptor 1 may be referred to, herein, at TFRC. This receptor plays a key role in the control of cell proliferation because iron is essential for sustaining ribonucleotide reductase activity, and is the only enzyme that catalyzes the conversion of ribonucleotides to deoxyribonucleotides. Preferably, the TfR is human TfR (hTfR). See e.g., Accession numbers NP_001121620.1; BAD92491.1; and NP_001300894.1; and e!Ensembl entry: ENSG00000072274. The human transferrin receptor 1 is expressed in several tissues, including but not limited to: cerebral cortex; cerebellum; hippocampus; caudate; parathyroid gland; adrenal gland; bronchus; lung; oral mucosa; esophagus; stomach; duodenum; small intestine; colon; rectum; liver; gallbladder; pancreas; kidney; urinary bladder; testis; epididymis; prostate; vagina; ovary; fallopian tube; endometrium; cervix; placenta; breast; heart muscle; smooth muscle; soft tissue; skin; appendix; lymph node; tonsil; and bone marrow. A related transferrin receptor is transferrin receptor 2 (TfR2). Human transferrin receptor 2 bears about 45% sequence identity to human transferrin receptor 1. Trinder & Baker, Transferrin receptor 2: a new molecule in iron metabolism. Int J Biochem Cell Biol. 2003 March; 35(3):292-6. Unless otherwise stated, transferrin receptor as used herein generally refers to transferrin receptor 1 (e.g., human transferrin receptor 1).

[0171] Human Transferrin (Tf) is a single chain, 80 kDa member of the anion-binding superfamily of proteins. Transferrin is a 698 amino acid precursor that is divided into a 19 aa signal sequence plus a 679 aa mature segment that typically contains 19 intrachain disulfide bonds. The N- and C-terminal flanking regions (or domains) bind ferric iron through the interaction of an obligate anion (e.g., bicarbonate) and four amino acids (His, Asp, and two Tyr). Apotransferrin (or iron-free) will initially bind one atom of iron at the C-terminus, and this is followed by subsequent iron binding by the N-terminus to form holotransferrin (diferric Tf, Holo-Tf). Through its C-terminal iron-binding domain, holotransferrin will interact with the TfR on the surface of cells where it is internalized into acidified endosomes. Iron dissociates from the Tf molecule within these endosomes, and is transported into the cytosol as ferrous iron. In addition to TfR, transferrin is reported to bind to cubulin, IGFBP3, microbial iron-binding proteins and liver-specific TfR2.

[0172] The blood-brain barrier (BBB) is located within the microvasculature of the brain, and it regulates passage of molecules from the blood to the brain. Burkhart et al., Accessing targeted nanoparticles to the brain: the vascular route. Curr Med Chem. 2014; 21(36):4092-9. The transcellular passage through the brain capillary endothelial cells can take place via 1) cell entry by leukocytes; 2) carrier-mediated influx of e.g., glucose by glucose transporter 1 (GLUT-1), amino acids by e.g., the L-type amino acid transporter 1 (LAT-1) and small peptides by e.g., organic anion-transporting peptide-B (OATP-B); 3) paracellular passage of small hydrophobic molecules; 4) adsorption-mediated transcytosis of e.g., albumin and cationized molecules; 5) passive diffusion of lipid soluble, non-polar solutes, including CO₂ and O₂; and 5) receptor-mediated transcytosis of, e.g., insulin by the insulin receptor and Tf by the TfR. Johnsen et al., Targeting the transferrin receptor for brain drug delivery, Prog Neurobiol. 2019 October; 181:101665.

[0173] For example, anti-TfR:ASM fusion proteins exhibiting high affinity to the transferrin receptor and superior blood-brain barrier crossing are provided. Surprisingly, fusions exhibiting high binding affinity to TfR crossed the blood-brain barrier more efficiently than that of low affinity binders. We found that high affinity antibodies impart the best delivery to the CNS and muscle in the anti-hTFRscfv:payload format. This is in contrast to previous findings with mono- and bivalent anti-TFR antibodies, where low affinity antibodies crossed the BBB more effectively. The fusions provided herein have an ability to efficiently deliver ASM to the brain and, thus, are an effective treatment of diseases such as ASM deficiency (ASMD).

[0174] Provided herein are antigen-binding proteins, such as antibodies, antigen-binding fragments thereof, such as Fabs and scFvs, that bind specifically to the transferrin receptor, preferably the human transferrin receptor 1 (anti-hTfR). For example, in an embodiment, the anti-hTfR is in the form of a fusion protein. The fusion protein includes the anti-hTfR antigen-binding protein fused to ASM. The anti-hTfRs efficiently cross the blood-brain barrier (BBB) and can, thereby, deliver the fused ASM to the brain.

[0175] An antigen-binding protein that specifically binds to transferrin receptor and fusions thereof, for example, a tag such as His6 and/or myc (e.g., human transferrin receptor (e.g., REGN2431) or monkey transferrin receptor (e.g., REGN2054)) binds at about 25° C., e.g., in a surface plasmon resonance assay, with a K_{D} of about 20 nM or a higher affinity. Such an antigen-binding protein may be referred to as “anti-TfR.” In some embodiments, the antigen-binding protein binds to human transferrin receptor with a K_{D} of about 0.41 nM or a stronger affinity. In some embodiments, the antigen-binding protein binds to human transferrin receptor with a K_{D} of about 3 nM or a stronger affinity. In some embodiments, the antigen-binding protein binds to human transferrin receptor with a K_{D} of about 0.45 nM to 3 nM. In some embodiments, a Fab having an HCVR and LCVR binds to human transferrin receptor with a K_{D} of about 0.65 nM or a stronger affinity. In some embodiments, a fusion protein disclosed herein binds to human transferrin receptor with a K_{D} of about 1×10⁻⁷ M or a stronger affinity.

[0176] In an embodiment, an anti-hTfR scFv:ASM fusion protein includes an scFv comprising the arrangement of variable regions as follows: LCVR-HCVR or HCVR-LCVR, wherein the HCVR and LCVR are optionally connected by a linker and the scFv is connected, optionally by a linker, to ASM (e.g., LCVR-(Gly₄Ser)₃(SEQ ID NO: 616)-HCVR-(Gly₄Ser)₂(SEQ ID NO: 617))-ASM; or LCVR-(Gly₄Ser)₃(SEQ ID NO: 616)-HCVR-(Gly₄Ser)₂(SEQ ID NO: 617))-ASM) (Gly₄Ser=SEQ ID NO: 537)). In one example, an scFv comprises an arrangement of variable regions as follows: LCVR-HCVR. In another example, an scFv comprises an arrangement of variable regions as follows: HCVR-LCVR. In one example, the linker between the HCVR and LCVR comprises, consists essentially of, or consists of three such repeats (SEQ ID NO: 616). For example, the coding sequence for the linker can comprise, consist essentially of, or consist of any one of SEQ ID NOS: 618-622 and 803. In another example, the linker between the HCVR and LCVR comprises, consists essentially of, or consists of two such repeats (SEQ ID NO: 617). For example, the coding sequence for the linker can comprise, consist essentially of, or consist of any one of SEQ ID NOS: 623-629. In another example, the linker between the HCVR and LCVR comprises, consists essentially of, or consists of one such repeat (SEQ ID NO: 537). For example, the coding sequence for the linker can comprise, consist essentially of, or consist of SEQ ID NO: 630 or 804. In one example, the linker between the scFv and ASM comprises, consists essentially of, or consists of three such repeats (SEQ ID NO: 616). For example, the coding sequence for the linker can comprise, consist essentially of, or consist of any one of SEQ ID NOS: 618-622 and 803. In another example, the linker between the scFv and ASM comprises, consists essentially of, or consists of two such repeats (SEQ ID NO: 617). For example, the coding sequence for the linker can comprise, consist essentially of, or consist of any one of SEQ ID NOS: 623-629. In another example, the linker between the scFv and ASM comprises, consists essentially of, or consists of one such repeat (SEQ ID NO: 537). For example, the coding sequence for the linker can comprise, consist essentially of, or consist of SEQ ID NO: 630 or 804. In another example, a rigid linker can be used such as a 2XH4 linker. In one example, the linker comprises, consists essentially of, or consists of AEAAAKEAAAKEAAAKEAAAKALEAEAAAKEAAAKEAAAKEAAAKA (SEQ ID NO: 808). For example, the coding sequence for the linker can comprise, consist essentially of, or consist of SEQ ID NO: 807.

[0177] An anti-hTfR:ASM optionally comprises a signal peptide, connected to the antigen-binding protein that binds specifically to transferrin receptor (TfR), preferably, human transferrin receptor (hTfR) which is fused (optionally by a linker) to ASM. In an embodiment, the signal peptide is the mROR signal sequence (e.g., mROR signal sequence-LCVR-(Gly₄Ser)₃(SEQ ID NO: 616)-HCVR-(Gly₄Ser)₂(SEQ ID NO: 617))-ASM; or LCVR-(Gly₄Ser)₃(SEQ ID NO: 616)-HCVR-(Gly₄Ser)₂(SEQ ID NO: 617))-ASM) (Gly₄Ser=SEQ ID NO: 537)). The term “fused” or “tethered” with regard to fused polypeptides refers to polypeptides joined directly or indirectly (e.g., via a linker or other polypeptide).

[0178] In an embodiment, the assignment of amino acids to each framework or CDR domain in an immunoglobulin is in accordance with the definitions of Sequences of Proteins of Immunological Interest, Kabat et al.; National Institutes of Health, Bethesda, Md.; 5^{th} ed.; NIH Publ. No. 91-3242 (1991); Kabat (1978) Adv. Prot. Chem. 32:1-75; Kabat et al., (1977) J. Biol. Chem. 252:6609-6616; Chothia, et al., (1987) J Mol. Biol. 196:901-917 or Chothia, et al., (1989) Nature 342: 878-883. Thus, included are antibodies and antigen-binding fragments including the CDRs of a V_{H} and the CDRs of a V_{L}, which V_{H} and V_{L} comprise amino acid sequences as set forth herein (see, e.g., sequences of Table 2, or variants thereof), wherein the CDRs are as defined according to Kabat and/or Chothia.

[0179] In some multidomain therapeutic proteins, the TfR-binding delivery domain is an antibody, an antibody fragment or other antigen-binding protein. In some multidomain therapeutic proteins, the TfR-binding delivery domain is an antigen-binding protein. Examples of antigen-binding proteins include, for example, a receptor-fusion molecule, a trap molecule, a receptor-Fc fusion molecule, an antibody, an Fab fragment, an F(ab′)2 fragment, an Fd fragment, an Fv fragment, a single-chain Fv (scFv) molecule, a dAb fragment, an isolated complementarity determining region (CDR), a CDR3 peptide, a constrained FR3-CDR3-FR4 peptide, a domain-specific antibody, a single domain antibody, a domain-deleted antibody, a chimeric antibody, a CDR-grafted antibody, a diabody, a triabody, a tetrabody, a minibody, a nanobody, a monovalent nanobody, a bivalent nanobody, a small modular immunopharmaceutical (SMIP), a camelid antibody (V_{H}H heavy chain homodimeric antibody), and a shark variable IgNAR domain.

[0180] Provided herein are antibodies that bind specifically to the human transferrin receptor 1. The term “antibody,” as used herein, refers to immunoglobulin molecules comprising four polypeptide chains, two heavy chains (HCs) and two light chains (LCs), inter-connected by disulfide bonds. In an embodiment, each antibody heavy chain (HC) comprises a heavy chain variable region (“HCVR” or “V_{H}”) (e.g., comprising SEQ ID NO: 171, 680, 181, 681, 191, 682, 201, 211, 221, 685, 231, 687, 241, 689, 251, 261, 691, 271, 281, 692, 291, 301, 311, 694, 321, 331, 696, 341, 351, 697, 361, 699, 371, 700, 381, 391, 401, 411, 421, 701, 431, 441, 451, 461, 471, 702, and/or 481 or a variant thereof) and a heavy chain constant region (e.g., human IgG, human IgG1 or human IgG4); and each antibody light chain (LC) comprises a light chain variable region (“LCVR or “V_{L}”) (e.g., SEQ ID NO: 176, 186, 196, 206, 683, 216, 684, 226, 686, 236, 688, 246, 690, 256, 266, 276, 286, 693, 296, 306, 316, 695, 326, 336, 346, 356, 698, 366, 376, 386, 396, 406, 416, 426, 436, 446, 456, 466, 476, 632, 486, and/or 703 or a variant thereof) and a light chain constant region (e.g., human kappa or human lambda). In an embodiment, each antibody heavy chain (HC) comprises a heavy chain variable region (“HCVR” or “V_{H}”) (e.g., comprising SEQ ID NO: 391 or 411, or a variant thereof) and a heavy chain constant region (e.g., human IgG, human IgG1 or human IgG4); and each antibody light chain (LC) comprises a light chain variable region (“LCVR or “V_{L}”) (e.g., SEQ ID NO: 396 or 416, or a variant thereof) and a light chain constant region (e.g., human kappa or human lambda). In an embodiment, each antibody heavy chain (HC) comprises a heavy chain variable region (“HCVR” or “V_{H}”) (e.g., comprising SEQ ID NO: 391, or a variant thereof) and a heavy chain constant region (e.g., human IgG, human IgG1 or human IgG4); and each antibody light chain (LC) comprises a light chain variable region (“LCVR or “V_{L}”) (e.g., SEQ ID NO: 396, or a variant thereof) and a light chain constant region (e.g., human kappa or human lambda). In an embodiment, each antibody heavy chain (HC) comprises a heavy chain variable region (“HCVR” or “V_{H}”) (e.g., comprising SEQ ID NO: 411, or a variant thereof) and a heavy chain constant region (e.g., human IgG, human IgG1 or human IgG4); and each antibody light chain (LC) comprises a light chain variable region (“LCVR or “V_{L}”) (e.g., SEQ ID NO: 416, or a variant thereof) and a light chain constant region (e.g., human kappa or human lambda). The VH and V_{L} regions can be further subdivided into regions of hypervariability, termed complementarity determining regions (CDR), interspersed with regions that are more conserved, termed framework regions (FR). Each V_{H} and V_{L} comprises three CDRs and four FRs. Anti-TfR antibodies disclosed herein can also be fused to ASM.

[0181] An anti-TfR antigen-binding protein provided herein may be an antigen-binding fragment of an antibody which may be tethered to ASM. The terms “antigen-binding portion” or “antigen-binding fragment” of an antibody, as used herein, refers to an immunoglobulin molecule that binds antigen but that does not include all of the sequences of a full antibody (preferably, the full antibody is an IgG). Non-limiting examples of antigen-binding fragments include: (i) Fab fragments; (ii) F(ab′)₂ fragments; (iii) Fd fragments; (iv) Fv fragments; (v) single-chain Fv (scFv) molecules; and (vi) dAb fragments; consisting of the amino acid residues that mimic the hypervariable region of an antibody (e.g., an isolated complementarity determining region (CDR) such as a CDR3 peptide), or a constrained FR3-CDR3-FR4 peptide. Other engineered molecules, such as domain-specific antibodies, single domain antibodies, domain-deleted antibodies, chimeric antibodies, CDR-grafted antibodies, diabodies, triabodies, tetrabodies, minibodies and small modular immunopharmaceuticals (SMIPs), are also encompassed within the expression “antigen-binding fragment,” as used herein.

[0182] An anti-TfR antigen-binding protein may be an scFv which may be tethered to an ASM. An scFv (single chain fragment variable) has variable regions of heavy (V_{H}) and light (V_{L}) domains (in either order), which, preferably, are joined together by a flexible linker (e.g., peptide linker). The length of the flexible linker used to link both of the V regions may be important for yielding the correct folding of the polypeptide chain. Previously, it has been estimated that the peptide linker must span 3.5 nm (35 Å) between the carboxy terminus of the variable domain and the amino terminus of the other domain without affecting the ability of the domains to fold and form an intact antigen-binding site (Huston et al., Protein engineering of single-chain Fv analogs and fusion proteins. Methods in Enzymology. 1991; 203:46-88). In an embodiment, the linker comprises an amino acid sequence of such length to separate the variable domains by about 3.5 nm.

[0183] In some embodiments, an anti-TfR antigen-binding protein described herein comprises a monovalent or “one-armed” antibody. The monovalent or “one-armed” antibodies as used herein refer to immunoglobulin proteins comprising a single variable domain. For example, the one-armed antibody may comprise a single variable domain within a Fab wherein the Fab is linked to at least one Fc fragment. In certain embodiments, the one-armed antibody comprises: (i) a heavy chain comprising a heavy chain constant region and a heavy chain variable region, (ii) a light chain comprising a light chain constant region and a light chain variable region, and (iii) a polypeptide comprising a Fc fragment or a truncated heavy chain. In certain embodiments, the Fc fragment or a truncated heavy chain comprised in the separate polypeptide is a “dummy Fc,” which refers to an Fc fragment that is not linked to an antigen binding domain. The one-armed antibodies of the present disclosure may comprise any of the HCVR/LCVR pairs or CDR amino acid sequences as set forth in Table 2 herein. One-armed antibodies comprising a full-length heavy chain, a full-length light chain and an additional Fc domain polypeptide can be constructed using standard methodologies (see, e.g., WO2010151792, which is incorporated herein by reference in its entirety), wherein the heavy chain constant region differs from the Fc domain polypeptide by at least two amino acids (e.g., H95R and Y96F according to the IMGT exon numbering system; or H435R and Y436F according to the EU numbering system). Such modifications are useful in purification of the monovalent antibodies (see WO2010151792).

[0184] An antigen-binding fragment of an antibody will, in an embodiment, comprise at least one variable domain. The variable domain may be of any size or amino acid composition and will generally comprise at least one CDR, which is adjacent to or in frame with one or more framework sequences. In antigen-binding fragments having a V_{H} domain associated with a V_{L} domain, the V_{H} and V_{L} domains may be situated relative to one another in any suitable arrangement. For example, the variable region may be dimeric and contain V_{H}-V_{H}, V_{H}-VL or V_{L}-V_{L} dimers. Alternatively, the antigen-binding fragment of an antibody may contain a monomeric V_{H} or V_{L} domain.

[0185] In certain embodiments, an antigen-binding fragment of an antibody may contain at least one variable domain covalently linked to at least one constant domain. Non-limiting, exemplary configurations of variable and constant domains that may be found within an antigen-binding fragment of an antibody described herein include: (i) V_{H}-CH1; (ii) V_{H}-CH2; (iii) V_{H}-CH3; (iv) V_{H}-CH1-CH2; (v) V_{H}-CH1-CH2-CH3; (vi) V_{H}-CH2-CH3; (vii) V_{H}-CL; (viii) V_{L}-CH1; (ix) V_{L}-CH2; (x) V_{L}-CH3; (xi) V_{L}-CH1-CH2; (xii) V_{L}-CH1-CH2-CH3; (xiii) V_{L}-CH2-CH3; and (xiv) V_{L}-CL. In any configuration of variable and constant domains, including any of the exemplary configurations listed above, the variable and constant domains may be either directly linked to one another or may be linked by a full or partial hinge or linker region. A hinge region may consist of at least 2 (e.g., 5, 10, 15, 20, 40, 60 or more) amino acids, which result in a flexible or semi-flexible linkage between adjacent variable and/or constant domains in a single polypeptide molecule. Moreover, an antigen-binding fragment of an antibody described herein may comprise a homo-dimer or hetero-dimer (or other multimer) of any of the variable and constant domain configurations listed above in non-covalent association with one another and/or with one or more monomeric V_{H} or V_{L} domain (e.g., by disulfide bond(s)). The present disclosure includes an antigen-binding fragment of an antigen-binding protein such as an antibody set forth herein.

[0186] Antigen-binding proteins (e.g., antibodies and antigen-binding fragments) may be monospecific or multi-specific (e.g., bispecific). Multispecific antigen-binding proteins are discussed further herein. The present disclosure includes monospecific as well as multispecific (e.g., bispecific) antigen-binding fragments comprising one or more variable domains from an antigen-binding protein that is specifically set forth herein.

[0187] The term “specifically binds” or “binds specifically” refers to those antigen-binding proteins (e.g., antibodies or antigen-binding fragments thereof) having a binding affinity to an antigen, such as human TfR protein, mouse TfR protein or monkey TfR protein, expressed as K_{D}, of at least about 10⁻⁹ M (e.g., 0.01, 0.1, 0.2, 0.3, 0.4, 0.5, 0.6, 0.7, 0.8, 0.9 or 1.0 nM), as measured by real-time, label free bio-layer interferometry assay, for example, at 25° C. or 37° C., e.g., an Octet® HTX biosensor, or by surface plasmon resonance, e.g., BIACORE™, or by solution-affinity ELISA. The present disclosure includes antigen-binding proteins that specifically bind to TfR protein. “Anti-TfR” refers to an antigen-binding protein (or other molecule), for example an antibody or antigen-binding fragment thereof, that binds specifically to TfR.

[0188] “Isolated” antigen-binding proteins (e.g., antibodies or antigen-binding fragments thereof), polypeptides, polynucleotides and vectors, are at least partially free of other biological molecules from the cells or cell culture from which they are produced. Such biological molecules include nucleic acids, proteins, other antibodies or antigen-binding fragments, lipids, carbohydrates, or other material such as cellular debris and growth medium. An isolated antigen-binding protein may further be at least partially free of expression system components such as biological molecules from a host cell or of the growth medium thereof. Generally, the term “isolated” is not intended to refer to a complete absence of such biological molecules (e.g., minor or insignificant amounts of impurity may remain) or to an absence of water, buffers, or salts or to components of a pharmaceutical formulation that includes the antigen-binding proteins (e.g., antibodies or antigen-binding fragments).

[0189] The present disclosure includes antigen-binding proteins, e.g., antibodies or antigen-binding fragments, that bind to the same epitope as an antigen-binding protein described herein. In some embodiments, provided is an antigen-binding protein that binds specifically to transferrin receptor or an antigenic-fragment thereof or variant thereof which binds to one or more epitopes of hTfR selected from: (a) an epitope comprising the sequence LLNE (SEQ ID NO: 752) and/or an epitope comprising the sequence TYKEL (SEQ ID NO: 706); (b) an epitope comprising the sequence DSTDFTGT (SEQ ID NO: 753) and/or an epitope comprising the sequence VKHPVTGQF (SEQ ID NO: 754) and/or an epitope comprising the sequence IERIPEL (SEQ ID NO: 755); (c) an epitope comprising the sequence LNENSYVPREAGSQKDEN (SEQ ID NO: 756); (d) an epitope comprising the sequence FEDL (SEQ ID NO: 718); (e) an epitope comprising the sequence IVDKNGRL (SEQ ID NO: 757); (f) an epitope comprising the sequence IVDKNGRLVY (SEQ ID NO: 758); (g) an epitope comprising the sequence DQTKF (SEQ ID NO: 759); (h) an epitope comprising the sequence LVENPGGY (SEQ ID NO: 760) and/or an epitope comprising the sequence PIVNAELSF (SEQ ID NO: 761) and/or an epitope comprising the sequence PYLGTTMDT (SEQ ID NO: 762); (i) an epitope comprising the sequence LLNENSYVPREAGSQKDENLAL (SEQ ID NO: 704) and/or an epitope comprising the sequence IYMDQTKFPIVNAEL (SEQ ID NO: 705) and/or an epitope comprising the sequence TYKEL (SEQ ID NO: 706); (j) an epitope comprising the sequence KRKLSEKLDSTDFTGTIKL (SEQ ID NO: 707) and/or an epitope comprising the sequence YTLIEKTMQNVKHPVTGQFL (SEQ ID NO: 708) and/or an epitope comprising the sequence LIERIPELNKVARAAAE (SEQ ID NO: 709); (k) an epitope comprising the sequence LNENSYVPREAGSQKDENL (SEQ ID NO: 710); (1) an epitope comprising the sequence GTKKDFEDL (SEQ ID NO: 711); (m) an epitope comprising the sequence SVIIVDKNGRLVYLVENPGGYVAYSK (SEQ ID NO: 712); (n) an epitope comprising the sequence LLNENSYVPREAGSQKDEN (SEQ ID NO: 713) and/or an epitope comprising the sequence DQTKFPIVNAEL (SEQ ID NO: 714) and/or an epitope comprising the sequence TYKELIERIPELNK (SEQ ID NO: 715); (o) an epitope comprising the sequence LLNENSYVPREAGSQKDEN (SEQ ID NO: 713) and/or an epitope comprising the sequence TYKELIERIPELNK (SEQ ID NO: 715); (p) an epitope comprising the sequence SVIIVDKNGRLVYLVENPGGYVAY (SEQ ID NO: 716); (q) an epitope comprising the sequence IYMDQTKFPIVNAEL (SEQ ID NO: 705) and/or an epitope comprising the sequence FGNMEGDCPSDWKTDSTCRM (SEQ ID NO: 717); (r) an epitope comprising the sequence LLNENSYVPREAGSQKDENLAL (SEQ ID NO: 704) and/or an epitope comprising the sequence LVENPGGYVAYSKAATVTGKL (SEQ ID NO: 719) and/or an epitope comprising the sequence IYMDQTKFPIVNAELSF (SEQ ID NO: 720) and/or an epitope comprising the sequence ISRAAAEKL (SEQ ID NO: 721) and/or an epitope comprising the sequence VTSESKNVKLTVSNVLKE (SEQ ID NO: 722) and/or an epitope comprising the sequence FCEDTDYPYLGTTMDT (SEQ ID NO: 723); (s) an epitope comprised within or overlapping with the sequence LLNENSYVPREAGSQKDENLAL (SEQ ID NO: 704) and/or an epitope comprised within or overlapping with the sequence IYMDQTKFPIVNAEL (SEQ ID NO: 705) and/or an epitope comprised within or overlapping with the sequence TYKEL (SEQ ID NO: 706); (t) an epitope comprised within or overlapping with the sequence KRKLSEKLDSTDFTGTIKL (SEQ ID NO: 707) and/or an epitope comprised within or overlapping with the sequence YTLIEKTMQNVKHPVTGQFL (SEQ ID NO: 708) and/or an epitope comprised within or overlapping with the sequence LIERIPELNKVARAAAE (SEQ ID NO: 709); (u) an epitope comprised within or overlapping with the sequence LNENSYVPREAGSQKDENL (SEQ ID NO: 710); (v) an epitope comprised within or overlapping with the sequence GTKKDFEDL (SEQ ID NO: 711); (w) an epitope comprised within or overlapping with the sequence SVIIVDKNGRLVYLVENPGGYVAYSK (SEQ ID NO: 712); (x) an epitope comprised within or overlapping with the sequence LLNENSYVPREAGSQKDEN (SEQ ID NO: 713) and/or an epitope comprised within or overlapping with the sequence DQTKFPIVNAEL (SEQ ID NO: 714) and/or an epitope comprised within or overlapping with the sequence TYKELIERIPELNK (SEQ ID NO: 715); (y) an epitope comprised within or overlapping with the sequence LLNENSYVPREAGSQKDEN (SEQ ID NO: 713) and/or an epitope comprised within or overlapping with the sequence TYKELIERIPELNK (SEQ ID NO: 715); (z) an epitope comprised within or overlapping with the sequence SVIIVDKNGRLVYLVENPGGYVAY (SEQ ID NO: 716); (aa) an epitope comprised within or overlapping with the sequence IYMDQTKFPIVNAEL (SEQ ID NO: 705) and/or an epitope comprised within or overlapping with the sequence FGNMEGDCPSDWKTDSTCRM (SEQ ID NO: 717); and (bb) an epitope comprised within or overlapping with the sequence LLNENSYVPREAGSQKDENLAL (SEQ ID NO: 704) and/or an epitope comprised within or overlapping with the sequence LVENPGGYVAYSKAATVTGKL (SEQ ID NO: 719) and/or an epitope comprised within or overlapping with the sequence IYMDQTKFPIVNAELSF (SEQ ID NO: 720) and/or an epitope comprised within or overlapping with the sequence ISRAAAEKL (SEQ ID NO: 721) and/or an epitope comprised within or overlapping with the sequence VTSESKNVKLTVSNVLKE (SEQ ID NO: 722) and/or an epitope comprised within or overlapping with the sequence FCEDTDYPYLGTTMDT (SEQ ID NO: 723). In some embodiments, provided is an antigen-binding protein, wherein the antigen binding protein comprises an antibody or antigen-binding fragment thereof which binds to one or more epitopes of hTfR selected from: (a) an epitope consisting of the sequence LLNE (SEQ ID NO: 752) and/or an epitope consisting of the sequence TYKEL (SEQ ID NO: 706); (b) an epitope consisting of the sequence DSTDFTGT (SEQ ID NO: 753) and/or an epitope consisting of the sequence VKHPVTGQF (SEQ ID NO: 754) and/or an epitope consisting of the sequence IERIPEL (SEQ ID NO: 755); (c) an epitope consisting of the sequence LNENSYVPREAGSQKDEN (SEQ ID NO: 756); (d) an epitope consisting of the sequence FEDL (SEQ ID NO: 718); (e) an epitope consisting of the sequence IVDKNGRL (SEQ ID NO: 757); (f) an epitope consisting of the sequence IVDKNGRLVY (SEQ ID NO: 758); (g) an epitope consisting of the sequence DQTKF (SEQ ID NO: 759); (h) an epitope consisting of the sequence LVENPGGY (SEQ ID NO: 760) and/or an epitope consisting of the sequence PIVNAELSF (SEQ ID NO: 761) and/or an epitope consisting of the sequence PYLGTTMDT (SEQ ID NO: 762); (i) an epitope consisting of the sequence LLNENSYVPREAGSQKDENLAL (SEQ ID NO: 704) and/or an epitope consisting of the sequence IYMDQTKFPIVNAEL (SEQ ID NO: 705) and/or an epitope consisting of the sequence TYKEL (SEQ ID NO: 706); (j) an epitope consisting of the sequence KRKLSEKLDSTDFTGTIKL (SEQ ID NO: 707) and/or an epitope consisting of the sequence YTLIEKTMQNVKHPVTGQFL (SEQ ID NO: 708) and/or an epitope consisting of the sequence LIERIPELNKVARAAAE (SEQ ID NO: 709); (k) an epitope consisting of the sequence LNENSYVPREAGSQKDENL (SEQ ID NO: 710); (1) an epitope consisting of the sequence GTKKDFEDL (SEQ ID NO: 711); (m) an epitope consisting of the sequence SVIIVDKNGRLVYLVENPGGYVAYSK (SEQ ID NO: 712); (n) an epitope consisting of the sequence LLNENSYVPREAGSQKDEN (SEQ ID NO: 713) and/or an epitope consisting of the sequence DQTKFPIVNAEL (SEQ ID NO: 714) and/or an epitope consisting of the sequence TYKELIERIPELNK (SEQ ID NO: 715); (o) an epitope consisting of the sequence LLNENSYVPREAGSQKDEN (SEQ ID NO: 713) and/or an epitope consisting of the sequence TYKELIERIPELNK (SEQ ID NO: 715); (p) an epitope consisting of the sequence SVIIVDKNGRLVYLVENPGGYVAY (SEQ ID NO: 716); (q) an epitope consisting of the sequence IYMDQTKFPIVNAEL (SEQ ID NO: 705) and/or an epitope consisting of the sequence FGNMEGDCPSDWKTDSTCRM (SEQ ID NO: 717); and (r) an epitope consisting of the sequence LLNENSYVPREAGSQKDENLAL (SEQ ID NO: 704) and/or an epitope consisting of the sequence LVENPGGYVAYSKAATVTGKL (SEQ ID NO: 719) and/or an epitope consisting of the sequence IYMDQTKFPIVNAELSF (SEQ ID NO: 720) and/or an epitope consisting of the sequence ISRAAAEKL (SEQ ID NO: 721) and/or an epitope consisting of the sequence VTSESKNVKLTVSNVLKE (SEQ ID NO: 722) and/or an epitope consisting of the sequence FCEDTDYPYLGTTMDT (SEQ ID NO: 723).

[0190] An antigen is a molecule, such as a peptide (e.g., TfR or a fragment thereof (an antigenic fragment)), to which, for example, an antibody or antigen-binding fragment thereof binds. The specific region on an antigen that an antibody recognizes and binds to is called the epitope. Antigen-binding proteins (e.g., antibodies) described herein that specifically bind to such antigens are part of the present disclosure.

[0191] The term “epitope” refers to an antigenic determinant (e.g., on TfR) that interacts with a specific antigen-binding site of an antigen-binding protein, e.g., a variable region of an antibody, known as a paratope. A single antigen may have more than one epitope. Thus, different antibodies may bind to different areas on an antigen and may have different biological effects. The term “epitope” may also refer to a site on an antigen to which B and/or T cells respond and/or to a region of an antigen that is bound by an antibody. Epitopes may be defined as structural or functional. Functional epitopes are generally a subset of the structural epitopes and have those residues that directly contribute to the affinity of the interaction. Epitopes may be linear or conformational, that is, composed of non-linear amino acids. In certain embodiments, epitopes may include determinants that are chemically active surface groupings of molecules such as amino acids, sugar side chains, phosphoryl groups, or sulfonyl groups, and, in certain embodiments, may have specific three-dimensional structural characteristics, and/or specific charge characteristics. Epitopes to which antigen-binding proteins described herein bind may be included in fragments of TfR, for example the extracellular domain thereof. Antigen-binding proteins (e.g., antibodies) described herein that bind to such epitopes are part of the present disclosure.

[0192] Methods for determining the epitope of an antigen-binding protein, e.g., antibody or fragment or polypeptide, include alanine scanning mutational analysis, peptide blot analysis (Reineke (2004) Methods Mol. Biol. 248: 443-63), peptide cleavage analysis, crystallographic studies and NMR analysis. In addition, methods such as epitope excision, epitope extraction and chemical modification of antigens can be employed (Tomer (2000) Prot. Sci. 9: 487-496). Another method that can be used to identify the amino acids within a polypeptide with which an antigen-binding protein (e.g., antibody or fragment or polypeptide) interacts is hydrogen/deuterium exchange detected by mass spectrometry. See, e.g., Ehring (1999) Analytical Biochemistry 267: 252-259; Engen and Smith (2001) Anal. Chem. 73: 256A-265A.

[0193] The present disclosure includes antigen-binding proteins that compete for binding to a TfR epitope as discussed herein, with an antigen-binding protein described herein. The term “competes” as used herein, refers to an antigen-binding protein (e.g., antibody or antigen-binding fragment thereof) that binds to an antigen (e.g., TfR) and inhibits or blocks the binding of another antigen-binding protein (e.g., antibody or antigen-binding fragment thereof) to the antigen. Unless otherwise stated, the term also includes competition between two antigen-binding proteins e.g., antibodies, in both orientations, i.e., a first antibody that binds antigen and blocks binding by a second antibody and vice versa. Thus, in an embodiment, competition occurs in one such orientation. In certain embodiments, the first antigen-binding protein (e.g., antibody) and second antigen-binding protein (e.g., antibody) may bind to the same epitope. Alternatively, the first and second antigen-binding proteins (e.g., antibodies) may bind to different, but, for example, overlapping or non-overlapping epitopes, wherein binding of one inhibits or blocks the binding of the second antibody, e.g., via steric hindrance. Competition between antigen-binding proteins (e.g., antibodies) may be measured by methods known in the art, for example, by a real-time, label-free bio-layer interferometry assay. Also, binding competition between TfR-binding proteins (e.g., monoclonal antibodies (mAbs)) can be determined using a real time, label-free bio-layer interferometry assay on an Octet RED384 biosensor (Pall ForteBio Corp.).

[0194] Typically, an antibody or antigen-binding fragment described herein which is modified in some way retains the ability to specifically bind to TfR, e.g., retains at least 10% of its TfR binding activity (when compared to the parental antibody) when that activity is expressed on a molar basis. Preferably, an antibody or antigen-binding fragment described herein retains at least 20%, 50%, 70%, 80%, 90%, 95% or 100% or more of the TfR binding affinity as the parental antibody. It is also intended that an antibody or antigen-binding fragment described herein may include conservative or non-conservative amino acid substitutions (referred to as “conservative variants” or “function conserved variants” of the antibody) that do not substantially alter its biologic activity.

[0195] An anti-TfR antigen-binding protein provided herein may be a monoclonal antibody or an antigen-binding fragment of a monoclonal antibody which may be tethered to ASM. Provided herein are monoclonal anti-TfR antigen-binding proteins, e.g., antibodies and antigen-binding fragments thereof, as well as monoclonal compositions comprising a plurality of isolated monoclonal antigen-binding proteins. The term “monoclonal antibody” or “mAb,” as used herein, refers to a member of a population of substantially homogeneous antibodies, i.e., the antibody molecules comprising the population are identical in amino acid sequence except for possible naturally occurring mutations that may be present in minor amounts. A “plurality” of such monoclonal antibodies and fragments in a composition refers to a concentration of identical (i.e., as discussed above, in amino acid sequence except for possible naturally occurring mutations that may be present in minor amounts) antibodies and fragments which is above that which would normally occur in nature, e.g., in the blood of a host organism such as a mouse or a human.

[0196] In an embodiment, an anti-TfR antigen-binding protein, e.g., antibody or antigen-binding fragment (which may be tethered to a Payload) comprises a heavy chain constant domain, e.g., of the type IgA (e.g., IgA1 or IgA2), IgD, IgE, IgG (e.g., IgG1, IgG2, IgG3 and IgG4) or IgM. In an embodiment, an antigen-binding protein, e.g., antibody or antigen-binding fragment, comprises a light chain constant domain, e.g., of the type kappa or lambda. In an embodiment, a V_{H} as set forth herein is linked to a human heavy chain constant domain (e.g., IgG) and a V_{L} as set forth herein is linked to a human light chain constant domain (e.g., kappa). The present disclosure includes antigen-binding proteins comprising the variable domains set forth herein, which are linked to a heavy and/or light chain constant domain, e.g., as set forth herein.

[0197] Included herein are human anti-TfR antigen-binding proteins which may be tethered to ASM. The term “human” antigen-binding protein, such as an antibody or antigen-binding fragment, as used herein, includes antibodies and fragments having variable and constant regions derived from human germline immunoglobulin sequences whether in a human cell or grafted into a non-human cell, e.g., a mouse cell. See, e.g., U.S. Pat. Nos. 8,502,018, 6,596,541 or U.S. Pat. No. 5,789,215. The anti-TfR human mAbs provided herein may include amino acid residues not encoded by human germline immunoglobulin sequences (e.g., mutations introduced by random or site-specific mutagenesis in vitro or by somatic mutation in vivo), for example in the CDRs and in particular CDR3. However, the term “human antibody,” as used herein, is not intended to include mAbs in which CDR sequences derived from the germline of another mammalian species (e.g., mouse) have been grafted onto human FR sequences. The term includes antibodies recombinantly produced in a non-human mammal or in cells of a non-human mammal. The term is not intended to include natural antibodies directly isolated from a human subject. The present disclosure includes human antigen-binding proteins (e.g., antibodies or antigen-binding fragments thereof described herein).

[0198] Also included herein are anti-TfR chimeric antigen-binding proteins, e.g., antibodies and antigen-binding fragments thereof (which may be tethered to ASM), and methods of use thereof. As used herein, a “chimeric antibody” is an antibody having the variable domain from a first antibody and the constant domain from a second antibody, where the first and second antibodies are from different species. (see, e.g., U.S. Pat. No. 4,816,567; and Morrison et al., (1984) Proc. Natl. Acad. Sci. USA 81: 6851-6855). The present disclosure includes chimeric antibodies comprising the variable domains which are set forth herein and a non-human constant domain.

[0199] The term “recombinant” anti-TfR antigen-binding proteins, such as antibodies or antigen-binding fragments thereof (which may be tethered to ASM), refers to such molecules created, expressed, isolated or obtained by technologies or methods known in the art as recombinant DNA technology which include, e.g., DNA splicing and transgenic expression. The term includes antibodies expressed in a non-human mammal (including transgenic non-human mammals, e.g., transgenic mice), or a cell (e.g., CHO cells) such as a cellular expression system or isolated from a recombinant combinatorial human antibody library. The present disclosure includes recombinant antigen-binding proteins, such as antibodies and antigen-binding fragments as set forth herein.

[0200] An antigen-binding fragment of an antibody will, in an embodiment, comprise less than a full antibody but still binds specifically to antigen, e.g., TfR, e.g., including at least one variable domain. The variable domain may be of any size or amino acid composition and will generally comprise at least one (e.g., 3) CDR(s), which is adjacent to or in frame with one or more framework sequences. In antigen-binding fragments having a V_{H} domain associated with a V_{L} domain, the V_{H} and V_{L} domains may be situated relative to one another in any suitable arrangement. For example, the variable region may be dimeric and contain V_{H}-V_{H}, V_{H}-VL or V_{L}-V_{L} dimers. Alternatively, the antigen-binding fragment of an antibody may contain a monomeric V_{H} and/or V_{L} domain which are bound non-covalently.

[0201] In certain embodiments, an antigen-binding fragment of an antibody may contain at least one variable domain covalently linked to at least one constant domain. Non-limiting, exemplary configurations of variable and constant domains that may be found within an antigen-binding fragment of an antibody described herein include: (i) V_{H}-CH1; (ii) V_{H}-CH2; (iii) V_{H}-CH3; (iv) V_{H}-CH1-CH2; (v) V_{H}-CH1-CH2-CH3; (vi) V_{H}-CH2-CH3; (vii) V_{H}-CL; (viii) V_{L}-CH1; (ix) V_{L}-CH2; (x) V_{L}-CH3; (xi) V_{L}-CH1-CH2; (xii) V_{L}-CH1-CH2-CH3; (xiii) V_{L}-CH2-CH3; and (xiv) V_{L}-CL. In any configuration of variable and constant domains, including any of the exemplary configurations listed above, the variable and constant domains may be either directly linked to one another or may be linked by a full or partial hinge or linker region. A hinge region may consist of at least 2 (e.g., 5, 10, 15, 20, 40, 60 or more) amino acids, which result in a flexible or semi-flexible linkage between adjacent variable and/or constant domains in a single polypeptide molecule. Moreover, an antigen-binding fragment of an antibody described herein may comprise a homo-dimer or hetero-dimer (or other multimer) of any of the variable and constant domain configurations listed above in non-covalent association with one another and/or with one or more monomeric V_{H} or V_{L} domain (e.g., by disulfide bond(s)). The present disclosure includes an antigen-binding fragment of an antigen-binding protein such as an antibody set forth herein.

[0202] Antigen-binding proteins (e.g., antibodies and antigen-binding fragments) may be monospecific or multi-specific (e.g., bispecific). Multispecific antigen-binding proteins are discussed further herein. The present disclosure includes monospecific as well as multispecific (e.g., bispecific) antigen-binding fragments comprising one or more variable domains from an antigen-binding protein that is specifically set forth herein.

[0203] A “variant” of a polypeptide, such as an immunoglobulin chain, refers to a polypeptide comprising an amino acid sequence that is at least about 70-99.9% (e.g., at least 70, 72, 74, 75, 76, 79, 80, 81, 82, 83, 84, 85, 86, 87, 88, 89, 90, 91, 92, 93, 94, 95, 96, 97, 98, 99, 99.5, 99.9%) identical or similar to a referenced amino acid sequence that is set forth herein (e.g., any of SEQ ID NOS: 171-174; 680; 176-179; 181-184; 681; 186-189; 191-194; 682; 196-199; 201-204; 206-209; 683; 211-214; 216-219; 684; 221-224; 685; 226-229; 686; 231-234; 687; 236-239; 688; 241-244; 689; 246-249; 690; 251-254; 256-259; 261-264; 691; 266-269; 271-274; 276-279; 281-284; 692; 286-289; 693; 291-294; 296-299; 301-304; 306-309; 311-314; 694; 316-319; 695; 321-324; 326-329; 331-334; 696; 336-339; 341-344; 346-349; 351-354; 697; 356-359; 698; 361-364; 699; 366-369; 371-374; 700; 376-379; 381-384; 386-389; 391-394; 396-399; 401-404; 406-409; 411-414; 416-419; 421-424; 701; 426-429; 431-434; 436-439; 441-444; 446-449; 451-454; 456-459; 461-464; 466-469; 471-474; 702; 476-479; 481-484; 486-489; 703; 492-523, 540-609, 632-638, 737, or 739); when the comparison is performed by a BLAST algorithm wherein the parameters of the algorithm are selected to give the largest match between the respective sequences over the entire length of the respective reference sequences (e.g., expect threshold: 10; word size: 3; max matches in a query range: 0; BLOSUM 62 matrix; gap costs: existence 11, extension 1; conditional compositional score matrix adjustment) and/or comprising the amino acid sequence but having one or more (e.g., 1, 2, 3, 4, 5, 6, 7, 8, 9 or 10) mutations (e.g., point mutation, insertion, truncation, and/or deletion).

[0204] Moreover, a variant of a polypeptide may include a polypeptide such as an immunoglobulin chain which may include the amino acid sequence of the reference polypeptide whose amino acid sequence is specifically set forth herein but for one or more (e.g., 1, 2, 3, 4, 5, 6, 7, 8, 9 or 10) mutations, e.g., one or more missense mutations (e.g., conservative substitutions), non-sense mutations, deletions, or insertions. For example, the present disclosure includes TfR-binding proteins which include an immunoglobulin light chain (or V_{L}) variant comprising the amino acid sequence set forth in SEQ ID NO: 176, 186, 196, 206, 683, 216, 684, 226, 686, 236, 688, 246, 690, 256, 266, 276, 286, 693, 296, 306, 316, 695, 326, 336, 346, 356, 698, 366, 376, 386, 396, 406, 416, 426, 436, 446, 456, 466, 476, 632, 486, or 703 but having one or more of such mutations and/or an immunoglobulin heavy chain (or V_{H}) variant comprising the amino acid sequence set forth in SEQ ID NO: 171, 680, 181, 681, 191, 682, 201, 211, 221, 685, 231, 687, 241, 689, 251, 261, 691, 271, 281, 692, 291, 301, 311, 694, 321, 331, 696, 341, 351, 697, 361, 699, 371, 700, 381, 391, 401, 411, 421, 701, 431, 441, 451, 461, 471, 702, or 481 but having one or more of such mutations. In an embodiment, a TfR-binding protein includes an immunoglobulin light chain variant comprising CDR-L1, CDR-L2 and CDR-L3 wherein one or more (e.g., 1 or 2 or 3) of such CDRs has one or more of such mutations (e.g., conservative substitutions) and/or an immunoglobulin heavy chain variant comprising CDR-H1, CDR-H2 and CDR-H3 wherein one or more (e.g., 1 or 2 or 3) of such CDRs has one or more of such mutations (e.g., conservative substitutions).

[0205] The following references relate to BLAST algorithms often used for sequence analysis: BLAST ALGORITHMS: Altschul et al. (2005) FEBS J. 272(20): 5101-5109; Altschul, S. F., et al., (1990) J. Mol. Biol. 215:403-410; Gish, W., et al., (1993) Nature Genet. 3:266-272; Madden, T. L., et al., (1996) Meth. Enzymol. 266:131-141; Altschul, S. F., et al., (1997) Nucleic Acids Res. 25:3389-3402; Zhang, J., et al., (1997) Genome Res. 7:649-656; Wootton, J. C., et al., (1993) Comput. Chem. 17:149-163; Hancock, J. M. et al., (1994) Comput. Appl. Biosci. 10:67-70; ALIGNMENT SCORING SYSTEMS: Dayhoff, M. O., et al., “A model of evolutionary change in proteins.” in Atlas of Protein Sequence and Structure, (1978) vol. 5, suppl. 3. M. O. Dayhoff (ed.), pp. 345-352, Natl. Biomed. Res. Found., Washington, D.C.; Schwartz, R. M., et al., “Matrices for detecting distant relationships.” in Atlas of Protein Sequence and Structure, (1978) vol. 5, suppl. 3.” M. O. Dayhoff (ed.), pp. 353-358, Natl. Biomed. Res. Found., Washington, D.C.; Altschul, S. F., (1991) J. Mol. Biol. 219:555-565; States, D. J., et al., (1991) Methods 3:66-70; Henikoff, S., et al., (1992) Proc. Natl. Acad. Sci. USA 89:10915-10919; Altschul, S. F., et al., (1993) J. Mol. Evol. 36:290-300; ALIGNMENT STATISTICS: Karlin, S., et al., (1990) Proc. Natl. Acad. Sci. USA 87:2264-2268; Karlin, S., et al., (1993) Proc. Natl. Acad. Sci. USA 90:5873-5877; Dembo, A., et al., (1994) Ann. Prob. 22:2022-2039; and Altschul, S. F. “Evaluating the statistical significance of multiple distinct local alignments.” in Theoretical and Computational Methods in Genome Research (S. Suhai, ed.), (1997) pp. 1-14, Plenum, N.Y.

[0206] A “conservatively modified variant” or a “conservative substitution”, e.g., of an immunoglobulin chain set forth herein, refers to a variant wherein there is one or more substitutions of amino acids in a polypeptide with other amino acids having similar characteristics (e.g., charge, side-chain size, hydrophobicity/hydrophilicity, backbone conformation and rigidity, etc.). Such changes can frequently be made without significantly disrupting the biological activity of the antibody or fragment. Those of skill in this art recognize that, in general, single amino acid substitutions in non-essential regions of a polypeptide do not substantially alter biological activity (see, e.g., Watson et al. (1987) Molecular Biology of the Gene, The Benjamin/Cummings Pub. Co., p. 224 (4^{th} Ed.)). In addition, substitutions of structurally or functionally similar amino acids are less likely to significantly disrupt biological activity. The present disclosure includes TfR-binding proteins comprising such conservatively modified variant immunoglobulin chains.

[0207] Examples of groups of amino acids that have side chains with similar chemical properties include 1) aliphatic side chains: glycine, alanine, valine, leucine and isoleucine; 2) aliphatic-hydroxyl side chains: serine and threonine; 3) amide-containing side chains: asparagine and glutamine; 4) aromatic side chains: phenylalanine, tyrosine, and tryptophan; 5) basic side chains: lysine, arginine, and histidine; 6) acidic side chains: aspartate and glutamate, and 7) sulfur-containing side chains: cysteine and methionine. Alternatively, a conservative replacement is any change having a positive value in the PAM250 log-likelihood matrix disclosed in Gonnet et al. (1992) Science 256: 1443-45.

[0208] Antibodies and antigen-binding fragments described herein comprise immunoglobulin chains including the amino acid sequences specifically set forth herein (and variants thereof) as well as cellular and in vitro post-translational modifications to the antibody or fragment. For example, the present disclosure includes antibodies and antigen-binding fragments thereof that specifically bind to TfR comprising heavy and/or light chain amino acid sequences set forth herein as well as antibodies and fragments wherein one or more asparagine, serine and/or threonine residues is glycosylated, one or more asparagine residues is deamidated, one or more residues (e.g., Met, Trp and/or His) is oxidized, the N-terminal glutamine is pyroglutamate (pyroE) and/or the C-terminal lysine or other amino acid is missing.

[0209] In an embodiment, an anti-hTfR:Payload or anti-hTfR:Payload (e.g., in scFv, Fab, antibody or antigen-binding fragment thereof format), e.g., wherein the Payload is human GAA, exhibits one or more of the following characteristics:
[0210] Affinity (K_{D}) for binding to human TfR at 25° C. in surface plasmon resonance format of about 41 nM or a higher affinity (e.g., about 1 or 0.1 nM or about 0.18 to about 1.2 nM, or higher);
[0211] Affinity (K_{D}) for binding to monkey TfR at 25° C. in surface plasmon resonance format of about 0 nM (no detectable binding) or a higher affinity (e.g., about 20 nM or higher);
[0212] Ratio of K_{D} for binding to monkey TfR/human TfR at 25° C. in surface plasmon resonance format of from 0 to 278 (e.g., about 17 or 18);
[0213] Blocks about 3, 5, 10 or 13% hTfR (e.g., Hmm-hTFRC such as REGN2431) binding to Human Holo-Tf when in Fab format (IgG1), e.g., no more than about 45% locking;
[0214] Blocks about 6, 8, 10 or 13% hTfR (e.g., Hmm-hTFRC such as REGN2431) binding to Human Holo-Tf when in scFv (V_{K}-V_{H}) format, e.g., no more than about 45% blocking;
[0215] Blocks about 11, 17, 23 or 26% hTfR (e.g., Hmm-hTFRC such as REGN2431) binding to Human Holo-Tf when in scFv (V_{H}-V_{L}) format, e.g., no more than about 45% blocking;
[0216] Exhibits a ratio of about 1 or greater; 0.67 or greater; 1.08 or greater; 0.91 or greater; 0.65 or greater; 0.55 or greater; 0.50 or greater; 0.27 or greater; 0.72 or greater; 1.05 or greater; 0.49 or greater; 0.29 or greater; 1.29 or greater; 1.72 or greater; 1.79 or greater; 3.08 or greater; 1.24 or greater; 0.59 or greater; or 0.47 or greater (or about 1-2 or greater) mature hGAA protein in brain (normalized to that of positive control 8D3:GAA scFv) in mice (e.g., Tfrc^{hum/hum} knock-in mice) administered the molecule via HDD, when in anti-hTfR scFv:hGAA format; or delivers mature human GAA protein to the brain of humans administered said scFv:hGAA molecule;
[0217] Exhibits a ratio of about 0.44, 0.05, 1.13 or 0.60 (about 0.1-1.2) mature hGAA protein in brain parenchyma (normalized to that of positive control 8D3:GAA scFv) in mice (e.g., Tfrc^{hum/hum} knock-in mice) administered the molecule via HDD, when in anti-hTfR scFv:hGAA format; or delivers mature human GAA protein to the brain parenchyma of humans administered said scFv:hGAA molecule;
[0218] Exhibits a ratio of about 0.67, 1.80, 1.78 or 7.74 (about 1-2) mature hGAA protein in quadriceps (normalized to that of positive control 8D3:GAA scFv) in mice (e.g., Tfrc^{hum/hum} knock-in mice) administered the molecule via HDD, when in anti-hTfR scFv:hGAA format; or delivers mature human GAA protein to the quadricep or other muscle tissue of humans administered said scFv:hGAA molecule;
[0219] Exhibits a ratio of about 0.94, 0.49, 0.61 or 1.90 (about 0.1-1.2) mature hGAA protein in brain parenchyma (normalized to that of positive control 8D3:GAA scFv) in mice (e.g., Tfrc^{hum} knock-in mice) administered the molecule via AAV8 liver depot, when in anti-hTfR scFv:hGAA format; or delivers mature human GAA protein to the brain parenchyma of humans administered said scFv:hGAA molecule via viral, e.g., AAV, liver depot or parenterally delivered in protein scFv:hGAA fusion format;
[0220] Delivers mature hGAA protein to serum, liver, cerebrum, cerebellum, spinal cord, heart and/or quadricep in mice (e.g., Tfrc^{hum} knock-in mice) administered the molecule via AAV8 liver depot, when in anti-hTfR scFv:hGAA format; or delivers mature human GAA protein to the serum, liver, cerebrum, cerebellum, spinal cord, heart and/or quadricep of humans administered said scFv:hGAA molecule via viral, e.g., AAV, liver depot or parenterally delivered in protein scFv:hGAA fusion format;
[0221] Reduces glycogen stored in cerebrum, cerebellum, spinal cord, heart and/or quadricep in mice (e.g., Tfrc^{hum} knock-in mice) administered the molecule via AAV8 liver depot, when in anti-hTfR scFv:hGAA format; e.g., by at least 75% to greater than 95% or greater than 99%; or reduces glycogen stored in cerebrum, cerebellum, spinal cord, heart and/or quadricep of humans administered said scFv:hGAA molecule via viral, e.g., AAV, liver depot, or parenterally delivered in protein scFv:hGAA fusion format;
[0222] Reduces glycogen levels in tissues (e.g., cerebellum) of Gaa^{-/-}/Tfrc^{hum} mice treated with liver-depot AAV8 anti-hTFRC scfv:hGAA (e.g., 4e11 vg/kg AAV8) by at least about 90% (e.g., about 95% or more) relative to untreated Gaa^{-/-}/Tfrc^{hum} mice;
[0223] Reduces glycogen levels in tissues (e.g., quadricep) of Gaa^{-/-}/Tfrc^{hum} mice treated with liver-depot AAV8 anti-hTFRC scfv:hGAA (e.g., 4e11 vg/kg AAV8) by at least about 89% (e.g., about 90% or 91% or more) relative to untreated Gaa^{-/-}/Tfrc^{hum} mice; or of humans treated with the fusion, e.g., by parenteral deliver of the fusion protein;
[0224] Does not cause abnormal iron homeostasis when administered (e.g., by HDD or AAV8 episomal liver depot) to Tfrc^{hum} mice; e.g., wherein the mice maintain normal serum, heart, liver and/or spleen iron levels, normal total iron-binding capacity (TIBC), and/or normal hepcidin levels); or when administered to humans, e.g., by parenteral deliver of the fusion protein;
[0225] When chromosomally inserted (e.g., into the albumin gene locus) or delivered episomally to a subject (e.g., to a human or Gaa^{-/-}/Tfrc^{hum/hum} mouse), for example, in an AAV8 vector, DNA encoding the fusion causes expression of mature human GAA to serum, liver, cerebrum and/or quadricep; and/or When chromosomally inserted (e.g., into the albumin gene locus) or delivered episomally (e.g., to a human or Gaa^{-/-}/Tfrc^{hum/hum} mouse), for example, in an AAV8 vector, DNA encoding the fusion reduces glycogen levels in the cerebrum and/or quadricep.
   *Tfrc^{hum} or Tfrc^{hum/hum} are homozygous knock-in mice.

[0226] The amino acid sequences of domains in anti-human transferrin receptor antigen-binding proteins of fusions disclosed herein are summarized below in Table 2. For example, anti-human transferrin receptor 1 antibodies and antigen-binding fragments thereof (e.g., scFvs and Fabs) comprising the HCVR and LCVR of the molecules in Table 2; or comprising the CDRs thereof, fused to ASM, are disclosed herein. In a specific example, the anti-human transferrin receptor 1 antibodies and antigen-binding fragments thereof (e.g., scFvs and Fabs) comprise the HCVR and LCVR of or comprise the CDRs of #23 or #25 in Table 2. In a specific example, the anti-human transferrin receptor 1 antibodies and antigen-binding fragments thereof (e.g., scFvs and Fabs) comprise the HCVR and LCVR of or comprise the CDRs of #23 in Table 2. In a specific example, the anti-human transferrin receptor 1 antibodies and antigen-binding fragments thereof (e.g., scFvs and Fabs) comprise the HCVR and LCVR of or comprise the CDRs of #25 in Table 2.

TABLE 2
Domains in Anti-hTfR Antibodies, Antigen-binding Fragments
(e.g., Fabs) or scFv Molecules in Fusion Proteins.

| | anti- | | | | | | | | | | |
|---|---|---|---|---|---|---|---|---|---|---|---|
| | hTfR | HC-VR | HC-VR | | | | LC-VR | LC-VR | | | |
| # | Molecule | NT | AA | HCDR1 | HCDR2 | HCDR3 | NT | AA | LCDR1 | LCDR2 | LCDR3 |
| 1 | 31874B | 170 | 171 or 680 | 172 | 173 | 174 | 175 | 176 | 177 | 178 | 179 |
| 2 | 31863B | 180 | 181 or 681 | 182 | 183 | 184 | 185 | 186 | 187 | 188 | 189 |
| 3 | 69348 | 190 | 191 or 682 | 192 | 193 | 194 | 195 | 196 | 197 | 198 | 199 |
| 4 | 69340 | 200 | 201 | 202 | 203 | 204 | 205 | 206 or 683 | 207 | 208 | 209 |
| 5 | 69331 | 210 | 211 | 212 | 213 | 214 | 215 | 216 or 684 | 217 | 218 | 219 |
| 6 | 69332 | 220 | 221 or 685 | 222 | 223 | 224 | 225 | 226 or 686 | 227 | 228 | 229 |
| 7 | 69326 | 230 | 231 or 687 | 232 | 233 | 234 | 235 | 236 or 688 | 237 | 238 | 239 |
| 8 | 69329 | 240 | 241 or 689 | 242 | 243 | 244 | 245 | 246 or 690 | 247 | 248 | 249 |
| 9 | 69323 | 250 | 251 | 252 | 253 | 254 | 255 | 256 | 257 | 258 | 259 |
| 10 | 69305 | 260 | 261 or 691 | 262 | 263 | 264 | 265 | 266 | 267 | 268 | 269 |
| 11 | 69307 | 270 | 271 | 272 | 273 | 274 | 275 | 276 | 277 | 278 | 279 |
| 12 | 12795B | 280 | 281 or 692 | 282 | 283 | 284 | 285 | 286 or 693 | 287 | 288 | 289 |
| 13 | 12798B | 290 | 291 | 292 | 293 | 294 | 295 | 296 | 297 | 298 | 299 |
| 14 | 12799B | 300 | 301 | 302 | 303 | 304 | 305 | 306 | 307 | 308 | 309 |
| 15 | 12801B | 310 | 311 or 694 | 312 | 313 | 314 | 315 | 316 or 695 | 317 | 318 | 319 |
| 16 | 12802B | 320 | 321 | 322 | 323 | 324 | 325 | 326 | 327 | 328 | 329 |
| 17 | 12808B | 330 | 331 or 696 | 332 | 333 | 334 | 335 | 336 | 337 | 338 | 339 |
| 18 | 12812B | 340 | 341 | 342 | 343 | 344 | 345 | 346 | 347 | 348 | 349 |
| 19 | 12816B | 350 | 351 or 697 | 352 | 353 | 354 | 355 | 356 or 698 | 357 | 358 | 359 |
| 20 | 12833B | 360 | 361 or 699 | 362 | 363 | 364 | 365 | 366 | 367 | 368 | 369 |
| 21 | 12834B | 370 | 371 or 700 | 372 | 373 | 374 | 375 | 376 | 377 | 378 | 379 |
| 22 | 12835B | 380 | 381 | 382 | 383 | 384 | 385 | 386 | 387 | 388 | 389 |
| 23 | 12847B | 390 | 391 | 392 | 393 | 394 | 395 | 396 | 397 | 398 | 399 |
| 24 | 12848B | 400 | 401 | 402 | 403 | 404 | 405 | 406 | 407 | 408 | 409 |
| 25 | 12843B | 410 | 411 | 412 | 413 | 414 | 415 | 416 | 417 | 418 | 419 |
| 26 | 12844B | 420 | 421 or 701 | 422 | 423 | 424 | 425 | 426 | 427 | 428 | 429 |
| 27 | 12845B | 430 | 431 | 432 | 433 | 434 | 435 | 436 | 437 | 438 | 439 |
| 28 | 12839B | 440 | 441 | 442 | 443 | 444 | 445 | 446 | 447 | 448 | 449 |
| 29 | 12841B | 450 | 451 | 452 | 453 | 454 | 455 | 456 | 457 | 458 | 459 |
| 30 | 12850B | 460 | 461 | 462 | 463 | 464 | 465 | 466 | 467 | 468 | 469 |
| 31 | 69261 | 470 | 471 or 702 | 472 | 473 | 474 | 475 | 476 or 632 | 477 | 478 | 479 |
| 32 | 69263 | 480 | 481 | 482 | 483 | 484 | 485 | 486 or 703 | 487 | 488 | 489 |

31874B
HCVR (V_{H}) Nucleotide Sequence
(SEQ ID NO: 170)
GAGGTGCAGCTGGTGGAGTCTGGGGGAGGCTTGGTACAGCCTGGGGGGTCCCTGAGACTCTCCTGTGCAGCCTCTGG
ATTCGCCTTTAGCAGCTATGCCATGACCTGGGTCCGACAGGCTCCAGGGAAGGGGCTGGAGTGGGTCTCAGTTATCA
GTGGTACTGGTGGTAGTACATACTACGCAGACTCCGTGAAGGGCCGGTTCACCATCTCCAGAGACAATTCCAAGAAC
ACGCTGTATCTACAAATGAACAGCCTGAGAGCCGAGGACACGGCCGTATATTACTGTGCGAAAGGGGGAGCAGCTCG
TAGAATGGAATACTTCCAGTACTGGGGCCAGGGCACCCTGGTCACCGTCTCCTCA
HCVR (V_{H}) Amino Acid Sequence
(SEQ ID NO: 171)
EVQLVESGGGLVQPGGSLRLSCAASGFAFSSYAMTWVRQAPGKGLEWVSVISGTGGSTYYADSVKGRFTISRDNSKN
TLYLQMNSLRAEDTAVYYCAKGGAARRMEYFQYWGQGTLVTVSS
or
(SEQ ID NO: 680)
EVQLVESGGGLVQPGGSLRLSCAASGFAFSSYAMTWVRQAPGKGLEWVSVISGTGGSTYYADSVKGRFTISRDNSKN
TLYLQMNSLRAEDTAVYYCAKGGAARRMEYFQYWGQGTTVTVSS
HCDR1:
(SEQ ID NO: 172)
GFAFSSYA
HCDR2:
(SEQ ID NO: 173)
ISGTGGST
HCDR3:
(SEQ ID NO: 174)
AKGGAARRMEYFQY
LCVR (V_{L}) Nucleotide Sequence
(SEQ ID NO: 175)
GACATCCAGATGACCCAGTCTCCATCCTCCCTGTCTGCATCTGTAGGAGACAGAGTCACCATCACTTGCCGGGCGAG
TCAGGGCATTAGCAATTATTTAGCCTGGTATCAGCAGAAACCAGGGAAAGTTCCTAACCTCCTTATCTATGCTGCAT
CCACTTTGCAATCAGGGGTCCCATCTCGATTCAGTGGCAGTGGATCTGGGACAGATTTCACTCTCACCATCAGCAGC
CTGCAGCCTGAAGATGTTGCAACTTATTACTGTCAAAAGTATAACAGTGCCCCTCTCACTTTCGGCGGAGGGACCAA
GGTGGAGATCAAA
LCVR (V_{L}) Amino Acid Sequence
(SEQ ID NO: 176)
DIQMTQSPSSLSASVGDRVTITCRASQGISNYLAWYQQKPGKVPNLLIYAASTLQSGVPSRFSGSGSGTDFTLTISS
LQPEDVATYYCQKYNSAPLTFGGGTKVEIK
LCDR1:
(SEQ ID NO: 177)
QGISNY
LCDR2:
(SEQ ID NO: 178)
AAS
LCDR3:
(SEQ ID NO: 179)
QKYNSAPLT
31863B
HCVR (V_{H}) Nucleotide Sequence
(SEQ ID NO: 180)
GAGGTGCAGCTGGTGGAGTCTGGGGGAGGCTTGGTACAGCCTGGGGGGTCCCTGAGACTCTCCTGTGCAGCCTCTGG
ATTCACCTTTAACAGCTATGCCATGACCTGGGTCCGCCAGGCTCCAGGGAAGGGGCTGGAGTGGGTCTCATTTATTG
GTGGTAGTACTGGTAACACATACTACGCAGGCTCCGTGAAGGGCCGGTTCACCATCTCCAGCGACAATTCCAAGAAG
ACGCTGTATCTGCAAATGAACAGCCTGAGAGCCGAGGACACGGCCGTATATTACTGTGCGAAAGGGGGAGCAGCTCG
TAGAATGGAATACTTCCAGCACTGGGGCCAGGGCACCCTGGTCACCGTCTCCTCA
HCVR (V_{H}) Amino Acid Sequence
(SEQ ID NO: 181)
EVQLVESGGGLVQPGGSLRLSCAASGFTFNSYAMTWVRQAPGKGLEWVSFIGGSTGNTYYAGSVKGRFTISSDNSKK
TLYLQMNSLRAEDTAVYYCAKGGAARRMEYFQHWGQGTLVTVSS
or
(SEQ ID NO: 681)
EVQLVESGGGLVQPGGSLRLSCAASGFTFNSYAMTWVRQAPGKGLEWVSFIGGSTGNTYYAGSVKGRFTISSDNSKK
TLYLQMNSLRAEDTAVYYCAKGGAARRMEYFQHWGQGTTVTVSS
HCDR1:
(SEQ ID NO: 182)
GFTFNSYA
HCDR2:
(SEQ ID NO: 183)
IGGSTGNT
HCDR3:
(SEQ ID NO: 184)
AKGGAARRMEYFQH
LCVR (V_{L}) Nucleotide Sequence
(SEQ ID NO: 185)
GACATCCAGATGACCCAGTCTCCATCCTCCCTGTCTGCATCTATAGGAGACAGAGTCACCATCACTTGCCGGGCGAG
TCAGGGCATTAGCAATTATTTAGCCTGGTATCAACAGAAACCAGGGAAAGTTCCTAAGCTCCTGATCTATGCTGCAT
CCACTTTGCAATCAGGGGTCCCATCTCGGTTCAGTGGCAGTGGATCTGGGACAGATTTCACTCTCACCATCAGCAGC
CTGCAGCCTGAAGATGTTGCAACTTATTACTGTCAAAACCATAACAGTGTCCCTCTCACTTTCGGCGGAGGGACCAA
GGTGGAGATCAAA
LCVR (V_{L}) Amino Acid Sequence
(SEQ ID NO: 186)
DIQMTQSPSSLSASIGDRVTITCRASQGISNYLAWYQQKPGKVPKLLIYAASTLQSGVPSRFSGSGSGTDFTLTISS
LQPEDVATYYCQNHNSVPLTFGGGTKVEIK
LCDR1:
(SEQ ID NO: 187)
QGISNY
LCDR2:
(SEQ ID NO: 188)
AAS
LCDR3:
(SEQ ID NO: 189)
QNHNSVPLT
69348
HCVR (V_{H}) Nucleotide Sequence
(SEQ ID NO: 190)
CAGGTGCAGCTGGTGGAGTCTGGGGGAGGCGTGGTCCAGCCTGGGAGGTCCCTGAGACTCTCCTGTGCAGCGTCTGG
ATTCACCTTCACTACCTATGGCATGCACTGGGTCCGCCAGGCTCCAGGCAAGGGGCTGGAGTGGGTGGCTGTTATAT
GGTATGATGGAAGTAATAAATATTATGGAGACTCCGTGAAGGGCCGATTCACCATCTCCAGAGACAATTCCAAGAAC
ACACTGTATCTGCAAATGAACAGCCTGAGAGTCGACGACACGGCTGTTTATTACTGTACGAGAACCCATGGCTATAC
CAGGTCGTCGGACGGTTTTGACTACTGGGGCCAGGGAACCCTGGTCACCGTCTCCTCA
HCVR (V_{H}) Amino Acid Sequence
(SEQ ID NO: 191)
QVQLVESGGGVVQPGRSLRLSCAASGFTFTTYGMHWVRQAPGKGLEWVAVIWYDGSNKYYGDSVKGRFTISRDNSKN
TLYLQMNSLRVDDTAVYYCTRTHGYTRSSDGFDYWGQGTLVTVSS
or
(SEQ ID NO: 682)
EVQLVESGGGVVQPGRSLRLSCAASGFTFTTYGMHWVRQAPGKGLEWVAVIWYDGSNKYYGDSVKGRFTISRDNSKN
TLYLQMNSLRVDDTAVYYCTRTHGYTRSSDGFDYWGQGTMVTVSS
HCDR1:
(SEQ ID NO: 192)
GFTFTTYG
HCDR2:
(SEQ ID NO: 193)
IWYDGSNK
HCDR3:
(SEQ ID NO: 194)
TRTHGYTRSSDGFDY
LCVR (V_{L}) Nucleotide Sequence
(SEQ ID NO: 195)
GACATCCAGATGACCCAGTCTCCATCCTCCCTGTCTGCATCTGTAGGAGACAGAGTCACCATCACTTGCCGGGCAAG
TCAGAGCATTAGAAATGTTTTAGGCTGGTTTCAGCAGAAACCAGGGAAAGCCCCTCAGCGCCTGATCTATGCTGCAT
CCAGTTTGCAAAGTGGGGTCCCATCAAGGTTCAGCGGCAGTGGATCTGGGACAGAATTCACTCTCACAATCAGCAGC
CTACAGCCTGAAGATTTTGCAACTTATTACTGTCTACAGCATAATTTTTACCCGCTCACTTTCGGCGGAGGGACCAA
GGTGGAGATCAAA
LCVR (V_{L}) Amino Acid Sequence
(SEQ ID NO: 196)
DIQMTQSPSSLSASVGDRVTITCRASQSIRNVLGWFQQKPGKAPQRLIYAASSLQSGVPSRFSGSGSGTEFTLTISS
LQPEDFATYYCLQHNFYPLTFGGGTKVEIK
LCDR1:
(SEQ ID NO: 197)
QSIRNV
LCDR2:
(SEQ ID NO: 198)
AAS
LCDR3:
(SEQ ID NO: 199)
LQHNFYPLT
69340
HCVR (V_{H}) Nucleotide Sequence
(SEQ ID NO: 200)
GAAGTGCAGCTGGTGGAGTCTGGGGGAGGCTTGGTACAGCCTGGCAGGTCCCTGAGACTCTCCTGTGCAGCCTCTGG
ATTCACCTTTGATGATAAAGCCATGCACTGGGTCCGGCAAGTTCCAGGGAAGGGCCTGGAATGGATCTCAGGTATTA
GTTGGAATAGTGGTACTATAGGCTATGCGGACTCTGTGAAGGGCCGATTCATCATCTCCAGAGACAACGCCAAGAAC
TCCCTGTATCTACAAATGAACAGTCTGAGAGCTGAGGACACGGCCTTGTATTACTGCGCAAAAGATGGAGATACCAG
TGGCTGGTACTGGTACGGTTTGGACGTCTGGGGCCAAGGGACCACGGTCACCGTCTCCTCA
HCVR (V_{H}) Amino Acid Sequence
(SEQ ID NO: 201)
EVQLVESGGGLVQPGRSLRLSCAASGFTFDDKAMHWVRQVPGKGLEWISGISWNSGTIGYADSVKGRFIISRDNAKN
SLYLQMNSLRAEDTALYYCAKDGDTSGWYWYGLDVWGQGTTVTVSS
HCDR1:
(SEQ ID NO: 202)
GFTFDDKA
HCDR2:
(SEQ ID NO: 203)
ISWNSGTI
HCDR3:
(SEQ ID NO: 204)
AKDGDTSGWYWYGLDV
LCVR (V_{L}) Nucleotide Sequence
(SEQ ID NO: 205)
GAAATTGTGTTGACACAGTCTCCTGCCACCCTGTCTTTGTCTCCAGGGGAAAGAGCCACCCTCTCCTGCAGGGCCAG
TCAGAGTGTTAGCAGCTACTTAGCCTGGTACCAACAGAAACCTGGCCAGGCTCCCAGGCTCCTCATCCATGATGTAT
CCAACAGGGCCACTGGCATCCCAGCCAGGTTCAGTGGCAGTGGGTCTGGGACAGACTTCACTCTCACCATCAGCAGT
CTAGAGCCTGAAGATTTTGTAGTTTATTACTGTCAGCAGCGTAGCGACTGGCCCATCACCTTCGGCCAAGGGACACG
ACTGGAGATTAAA
LCVR (V_{L}) Amino Acid Sequence
(SEQ ID NO: 206)
EIVLTQSPATLSLSPGERATLSCRASQSVSSYLAWYQQKPGQAPRLLIHDVSNRATGIPARFSGSGSGTDFTLTISS
LEPEDFVVYYCQQRSDWPITFGQGTRLEIK
or
(SEQ ID NO: 683)
DIMTQSPATLSLSPGERATLSCRASQSVSSYLAWYQQKPGQAPRLLIHDVSNRATGIPARFSGSGSGTDFTLTISS
LEPEDFVVYYCQQRSDWPITFGQGTRLEIK
LCDR1:
(SEQ ID NO: 207)
QSVSSY
LCDR2:
(SEQ ID NO: 208)
DVS
LCDR3:
(SEQ ID NO: 209)
QQRSDWPIT
69331
HCVR (V_{H}) Nucleotide Sequence
(SEQ ID NO: 210)
CAGGTGCAGCTGGTGGAGTCTGGGGGAGGCGTGGTCCAGCCTGGGAGGTCCCTGAGACTCTCCTGTATAGCCTCTGG
ATTCACCTTCAGTGTCTATGGCATTCACTGGGTCCGCCAGGCTCCAGGCAAGGGGCTGGAGTGGATGGCAGTAATAT
CACATGATGGAAATATTAAACACTATGCAGACTCCGTGAAGGGCCGATTCACCATCTCCAGAGACAATTCCAAGAAC
ACGCTGTATCTTCAAATTAACAGCCTGAGAACTGAGGACACGGCTGTGTATTACTGTGCGAAAGATACCTGGAACTC
CCTTGATACTTTTGATATCTGGGGCCAAGGGACAATGGTCACCGTCTCTTCA
HCVR (V_{H}) Amino Acid Sequence
(SEQ ID NO: 211)
QVQLVESGGGVVQPGRSLRLSCIASGFTFSVYGIHWVRQAPGKGLEWMAVISHDGNIKHYADSVKGRFTISRDNSKN
TLYLQINSLRTEDTAVYYCAKDTWNSLDTFDIWGQGTMVTVSS
HCDR1:
(SEQ ID NO: 212)
GFTFSVYG
HCDR2:
(SEQ ID NO: 213)
ISHDGNIK
HCDR3:
(SEQ ID NO: 214)
AKDTWNSLDTEDI
LCVR (V_{L}) Nucleotide Sequence
(SEQ ID NO: 215)
GACATCCAGTTGACCCAGTCTCCATCCTCCCTGTCTGCATCTGTAGGAGACAGAGTCACCATCACTTGCTGGGCCAG
TCAGGGCATTAGCAGTTATTTAGCCTGGTATCAGCAAAAACCAGGGAAAGCCCCTAAGCTCCTGATCTATGCTGCAT
CCACTTTGCAAAGTGGGGTCCCATCAAGGTTCAGCGGCAGTGGATCTGGGACAGAATTCACTCTCACAATCAGCAGC
CTGCAGCCTGAAGATTTTGCAACTTATTACTGTCAACAGCTTAATAGTTACCCTCTCACTTTCGGCGGAGGGACCAA
GGTGGAGATCAAA
LCVR (V_{L}) Amino Acid Sequence
(SEQ ID NO: 216)
DIQLTQSPSSLSASVGDRVTITCWASQGISSYLAWYQQKPGKAPKLLIYAASTLQSGVPSRFSGSGSGTEFTLTISS
LQPEDFATYYCQQLNSYPLTFGGGTKVEIK
or
(SEQ ID NO: 684)
DIQMTQSPSSLSASVGDRVTITCWASQGISSYLAWYQQKPGKAPKLLIYAASTLQSGVPSRFSGSGSGTEFTLTISS
LQPEDFATYYCQQLNSYPLTFGGGTKVEIK
LCDR1:
(SEQ ID NO: 217)
QGISSY
LCDR2:
(SEQ ID NO: 218)
AAS
LCDR3:
(SEQ ID NO: 219)
QQLNSYPLT
69332
HCVR (V_{H}) Nucleotide Sequence
(SEQ ID NO: 220)
CAGGTCACCTTGAGGGAGTCTGGTCCCGCGCTGGTGAAACCCTCACAGACCCTCACACTGACCTGCACCTTCTCTGG
ATTCTCACTCAACACTTATGGGATGTTTGTGAGCTGGATCCGTCAGCCTCCAGGGAAGGCCCTAGAGTGGCTTGCAC
ACATTCATTGGGATGATGATAAATACTACAGCACATCTCTGAAGACCAGGCTCACCATCTCCAAGGACACCTCCAAA
AACCAGGTGGTCCTTACAATGACCAACATGGACCCTGTGGACACAGCCACGTATTATTGTGCACGGGGGCACAATAA
TTTGAACTACATCATCCACTGGGGCCAGGGAACCCTGGTCACCGTCTCCTCA
HCVR (V_{H}) Amino Acid Sequence
(SEQ ID NO: 221)
QVTLRESGPALVKPSQTLTLTCTFSGFSLNTYGMFVSWIRQPPGKALEWLAHIHWDDDKYYSTSLKTRLTISKDTSK
NQVVLTMTNMDPVDTATYYCARGHNNLNYIIHWGQGTLVTVSS
or
(SEQ ID NO: 685)
QVQLVESGPALVKPSQTLTLTCTFSGFSLNTYGMFVSWIRQPPGKALEWLAHIHWDDDKYYSTSLKTRLTISKDTSK
NQVVLTMTNMDPVDTATYYCARGHNNLNYIIHWGQGTLVTVSS
HCDR1:
(SEQ ID NO: 222)
GFSLNTYGMF
HCDR2:
(SEQ ID NO: 223)
IHWDDDK
HCDR3:
(SEQ ID NO: 224)
ARGHNNLNYIIH
LCVR (V_{L}) Nucleotide Sequence
(SEQ ID NO: 225)
GCCATCCAGATGACCCAGTCTCCATCCTCCCTGTCTGCATCTGTAGGAGACAGAGTCACCATCACTTGCCGGGCAAG
TCAGGGCATTAGAAATGATTTAGGCTGGTATCAGCAGAAACCAGGGAAAGCCCCTAAGCTCCTGATCTATGCTGCAT
CCACTTTACAAAGTGGGGTCCCATCAAGGTTCAGCGGCAGTGGATCTGGCACAGATTTCACTCTCACCATCAGCAGC
CTGCAGCCTGAAGATTTTGCAACTTATTACTGTCTACAAGATTACAATTACCCATTCACTTTCGGCCCTGGGACCAA
AGTGGATATCAAA
LCVR (V_{L}) Amino Acid Sequence
(SEQ ID NO: 226)
AIQMTQSPSSLSASVGDRVTITCRASQGIRNDLGWYQQKPGKAPKLLIYAASTLQSGVPSRFSGSGSGTDFTLTISS
LQPEDFATYYCLQDYNYPFTFGPGTKVDIK
or
(SEQ ID NO: 686)
DILMTQSPSSLSASVGDRVTITCRASQGIRNDLGWYQQKPGKAPKLLIYAASTLQSGVPSRFSGSGSGTDFTLTISS
LQPEDFATYYCLQDYNYPFTFGPGTKVEIK
LCDR1:
(SEQ ID NO: 227)
QGIRND
LCDR2:
(SEQ ID NO: 228)
AAS
LCDR3:
(SEQ ID NO: 229)
LQDYNYPFT
69326
HCVR (V_{H}) Nucleotide Sequence
(SEQ ID NO: 230)
GAGGTGCAGCTGGTGGAGTCTGGGGGAGGCTTGGTACAGCCTGGAGGGTCCCTGAGACTCTCCTGTGCAGTCTCTGG
ATTCATCTTCAGTAGTTATGAAATGAACTGGGTCCGCCAGGCTCCAGGGAAGGGGCTGGAGTGGGTTTCATACATTA
GTAGTAGTGGTAGTACCATATTCTACGCAGACTCTGTGAAGGGCCGATTCACCATCTCCAGAGACAACGCCAAGAAC
TCACTGTATCTGCAAATGAACAGCCTGAGAGCCGAGGACACGGCTGTTTATTACTGTGTGTCTGGAGTGGTCCTTTT
TGATGTCTGGGGCCAAGGGACAATGGTCACCGTCTCTTCA
HCVR (V_{H}) Amino Acid Sequence
(SEQ ID NO: 231)
EVQLVESGGGLVQPGGSLRLSCAVSGFIFSSYEMNWVRQAPGKGLEWVSYISSSGSTIFYADSVKGRFTISRDNAKN
SLYLQMNSLRAEDTAVYYCVSGVVLFDVWGQGTMVTVSS
or
(SEQ ID NO: 687)
QVQLVESGGGLVQPGGSLRLSCAVSGFIFSSYEMNWVRQAPGKGLEWVSYISSSGSTIFYADSVKGRFTISRDNAKN
SLYLQMNSLRAEDTAVYYCVSGVVLFDVWGQGTMVTVSS
HCDR1:
(SEQ ID NO: 232)
GFIFSSYE
HCDR2:
(SEQ ID NO: 233)
ISSSGSTI
HCDR3:
(SEQ ID NO: 234)
VSGVVLFDV
LCVR (V_{L}) Nucleotide Sequence
(SEQ ID NO: 235)
GAAATAGTGATGACGCAGTCTCCAGCCACCCTGTCTGTGTCTCCGGGGGAAAGAGCCACCCTCTCCTGCAGGGCCAG
TCAGAGTGTTAGCAGCAACTTTGCCTGGTACCAACAGAAACCTGGCCAGGCTCCCAGGCTCCTCATCTATAGTGCAT
CCTCCAGGGCCACTGGTATCCCAGTCAGGTTCAGTGGCAGTGGGTCTGGGACAGAGTTCACTCTCACCATCAGCAGC
CTGCAGTCTGAAGATTTTGCAGTTTATTACTGTCAGCAGTATAATATCTGGCCTCGGACGTTCGGCCAAGGGACCAA
GGTGGAAATCAAA
LCVR (V_{L}) Amino Acid Sequence
(SEQ ID NO: 236)
EIVMTQSPATLSVSPGERATLSCRASQSVSSNFAWYQQKPGQAPRLLIYSASSRATGIPVRFSGSGSGTEFTLTISS
LQSEDFAVYYCQQYNIWPRTFGQGTKVEIK
or
(SEQ ID NO: 688)
DIVMTQSPATLSVSPGERATLSCRASQSVSSNFAWYQQKPGQAPRLLIYSASSRATGIPVRFSGSGSGTEFTLTISS
LQSEDFAVYYCQQYNIWPRTFGQGTKVEIK
LCDR1:
(SEQ ID NO: 237)
QSVSSN
LCDR2:
(SEQ ID NO: 238)
SAS
LCDR3:QQYNIWPRT
(SEQ ID NO: 239)
69329
HCVR (V_{H}) Nucleotide Sequence
(SEQ ID NO: 240)
GAGGTGCAGCTGGTGGAGTCTGGGGGAGGCTTGGTCCAGCCTGGGGGGTCCCTGAGACTCTCCTGTGCAGCCTCTGG
ATTCACCTTTAGTAACTATTGGATGACCTGGGTCCGCCAGGCTCCAGGGAAGGGGCTGGAGTGGGTGGCCAACATAA
AGGAAGATGGAAGTGAGAAAGACTATGTGGACTCTGTGAAGGGCCGATTCACCATCTCCAGAGACAACGCCAAGAAC
TCACTGTATCTGCAAATGAACAGCCTGAGAGGCGAGGACACGGCTGTGTATTACTGTGCGAGAGATGGGGAGCAGCT
CGTCGATTACTACTACTACTACGTTATGGACGTCTGGGGCCAAGGGACCACGGTCACCGTCTCCTCA
HCVR (V_{H}) Amino Acid Sequence
(SEQ ID NO: 241)
EVQLVESGGGLVQPGGSLRLSCAASGFTFSNYWMTWVRQAPGKGLEWVANIKEDGSEKDYVDSVKGRFTISRDNAKN
SLYLQMNSLRGEDTAVYYCARDGEQLVDYYYYYVMDVWGQGTTVTVSS
or
(SEQ ID NO: 689)
QVQLVESGGGLVQPGGSLRLSCAASGFTFSNYWMTWVRQAPGKGLEWVANIKEDGSEKDYVDSVKGRFTISRDNAKN
SLYLQMNSLRGEDTAVYYCARDGEQLVDYYYYYVMDVWGQGTTVTVSS
HCDR1:
(SEQ ID NO: 242)
GFTFSNYW
HCDR2:
(SEQ ID NO: 243)
IKEDGSEK
HCDR3:
(SEQ ID NO: 244)
ARDGEQLVDYYYYYVMDV
LCVR (V_{L}) Nucleotide Sequence
(SEQ ID NO: 245)
GACATCCAGATGACCCAGTCTCCATCTTCCGTGTCTGCATCTGTAGGAGACAGAGTCACCATCACTTGTCGGGCGAG
TCAGGGTATTAGCAGCTGGTTAGCCTGGTATCAGCAGAAACCAGGGAAAGCCCCTAAGCTCCTGATCTATGCTGCAT
CCAGTTTGCAAAGTGGGGTCCCATCAAGGTTCAGCGGCAGTGGATCTGGGACAGATTTCACTCTCACCATCAGCAGC
CTGCAGCCTGAAGATTTTGCAACTTACTATTGTCAAAAGGCTAACAGTTTCCCGTACACTTTTGGCCAGGGGACCAA
GCTGGAGATCAAA
LCVR (V_{L}) Amino Acid Sequence
(SEQ ID NO: 246)
DIQMTQSPSSVSASVGDRVTITCRASQGISSWLAWYQQKPGKAPKLLIYAASSLQSGVPSRFSGSGSGTDFTLTISS
LQPEDFATYYCQKANSFPYTFGQGTKLEIK
or
(SEQ ID NO: 690)
DIQMTQSPSSVSASVGDRVTITCRASQGISSWLAWYQQKPGKAPKLLIYAASSLQSGVPSRFSGSGSGTDFTLTISS
LQPEDFATYYCQKANSFPYTFGQGTKVEIK
LCDR1:
(SEQ ID NO: 247)
QGISSW
LCDR2:
(SEQ ID NO: 248)
AAS
LCDR3:
(SEQ ID NO: 249)
QKANSFPYT
69323 (REGN16816)
HCVR (V_{H}) Nucleotide Sequence
(SEQ ID NO: 250)
GAAGTGCAGCTGGTGGAGTCTGGGGGAGGCTTGGTACAGCCTGGCAGGTCCCTGAGACTCTCCTGTGCAGCCTCTGG
ATTCACCTTTGATGACTATGCCATGCACTGGGTCCGGCAAGCTCCAGGGAAGGGCCTGGAGTGGGTCTCAGGTATTA
GTTGGAATAGTGGTTACATAGGCTATGCGGACTCTGTGAAGGGCCGATTCACCATCTCCAGAGACAACGCCGAGAAC
TCCCTACATCTGCAAATGAACAGTCTGAGAGCTGAGGACACGGCCTTGTATTACTGTGCAAGAGGGGGATCTACTCT
GGTTCGGGGAGTTAAGGGAGGCTACTACGGTATGGACGTCTGGGGCCAAGGGACCACGGTCACCGTCTCCTCA
HCVR (V_{H}) Amino Acid Sequence
(SEQ ID NO: 251)
EVQLVESGGGLVQPGRSLRLSCAASGFTFDDYAMHWVRQAPGKGLEWVSGISWNSGYIGYADSVKGRFTISRDNAEN
SLHLQMNSLRAEDTALYYCARGGSTLVRGVKGGYYGMDVWGQGTTVTVSS
HCDR1:
(SEQ ID NO: 252)
GFTFDDYA
HCDR2:
(SEQ ID NO: 253)
ISWNSGYI
HCDR3:
(SEQ ID NO: 254)
ARGGSTLVRGVKGGYYGMDV
LCVR (V_{L}) Nucleotide Sequence
(SEQ ID NO: 255)
GACATCCAGATGACCCAGTCTCCATCCTCCCTGTCTGCATCTGTAGGAGACAGAGTCACCATCACTTGCCGGGCAAG
TCAGAGCATAAGTAGCTATTTAAATTGGTATCAGCAGAAACCAGGTAAAGCCCCTAAGGTCCTGATCTATGCTGCAT
CCAGTTTGCAAAGTGGGGTCCCATCAAGGTTCAGTGGCAGTGGATCTGGGACAGATTTCACTCTCACCATCAGCAGT
CTGCAACCTGAAGATTTTGCAACTTACTACTGTCAACAGAGTTACAGTATTCCGCTCACTTTCGGCGGAGGGACCAA
GGTGGAGATCAAA
LCVR (V_{L}) Amino Acid Sequence
(SEQ ID NO: 256)
DIQMTQSPSSLSASVGDRVTITCRASQSISSYLNWYQQKPGKAPKVLIYAASSLQSGVPSRFSGSGSGTDFTLTISS
LQPEDFATYYCQQSYSIPLTFGGGTKVEIK
LCDR1:
(SEQ ID NO: 257)
QSISSY
LCDR2:
(SEQ ID NO: 258)
AAS
LCDR3:
(SEQ ID NO: 259)
QQSYSIPLT
69305
HCVR (V_{H}) Nucleotide Sequence
(SEQ ID NO: 260)
CAGGTGCAGCTGGTGGAGTCTGGGGGAGGCGTGGTCCAGCCTGGGAGGTCCCTGAGACTCTCCTGTGCAGCGTCTGG
ATTCACCTTCAGTAGCTATGGCATGCACTGGGTCCGCCAGGCTCCAGGCAAGGGGCTGGAGTGGGTGGCAGTTATAT
GGTATGATGGAAGTAATAAATACTATGCAGACTCCGTGAAGGGCCGATTCACCATCTCCAGAGACATTTCCAAGAAC
ACGCTGTATCTGCAAATGAACAGCCTGAGAGCCGAGGACACGGCCGTATATTACTGTGCGGGTCAACTGGATCTCTT
CTTTGACTACTGGGGCCAGGGAACCCTGGTCACCGTCTCCTCA
HCVR (V_{H}) Amino Acid Sequence
(SEQ ID NO: 261)
QVQLVESGGGVVQPGRSLRLSCAASGFTFSSYGMHWVRQAPGKGLEWVAVIWYDGSNKYYADSVKGRFTISRDISKN
TLYLQMNSLRAEDTAVYYCAGQLDLFFDYWGQGTLVTVSS
or
(SEQ ID NO: 691)
EVQLVESGGGVVQPGRSLRLSCAASGFTFSSYGMHWVRQAPGKGLEWVAVIWYDGSNKYYADSVKGRFTISRDISKN
TLYLQMNSLRAEDTAVYYCAGQLDLFFDYWGQGTLVTVSS
HCDR1:
(SEQ ID NO: 262)
GFTFSSYG
HCDR2:
(SEQ ID NO: 263)
IWYDGSNK
HCDR3:
(SEQ ID NO: 264)
AGQLDLFFDY
LCVR (V_{L}) Nucleotide Sequence
(SEQ ID NO: 265)
GACATCCAGATGACCCAGTCTCCATCCTCCCTGTCTGCATCTGTAGGAGACAGAGTCACCATCACTTGCCGGGCAAG
TCAGAGCATTGACAGGTATTTAAATTGGTATCGGCAGAAACCAGGGAAAGCCCCTAAGCTCCTGATCTATACTACAT
CCAGTTTGCAAAGTGGGGTCCCATCAAGGTTCAGTGGCAGTGGATCTGGGACAGATTTCACTCTCACCCTCAGCAGT
CTGCAGCCTGAAGATTTTGCAACTTACTACTGTCAGCAGAGTTACAGTCCCCCGCTCACTTTCGGCGGAGGGACCAA
GGTGGAGATCAAA
LCVR (V_{L}) Amino Acid Sequence
(SEQ ID NO: 266)
DIQMTQSPSSLSASVGDRVTITCRASQSIDRYLNWYRQKPGKAPKLLIYTTSSLQSGVPSRFSGSGSGTDFTLTLSS
LQPEDFATYYCQQSYSPPLTFGGGTKVEIK
LCDR1:
(SEQ ID NO: 267)
QSIDRY
LCDR2:
(SEQ ID NO: 268)
TTS
LCDR3:
(SEQ ID NO: 269)
QQSYSPPLT
69307 (REGN16817)
HCVR (V_{H}) Nucleotide Sequence
(SEQ ID NO: 270)
GAGGTGCAGCTGGTGGAGTCTGGGGGAGGCTTGGTCCAGCCTGGGGGGTCCCTGAGACTCTCCTGTACAGCCTCTGG
ATTCACCTTTAGTAACTATTGGATGACCTGGGTCCGCCAGGCTCCAGGGAAGGGGCTGGAGTGGGTGGCCAACATAA
AGGAAGATGGAAGTGAGAAAGAGTATGTGGACTCTGTGAAGGGCCGGTTCACCATCTCCAGAGACAACGCCAAGAAT
TCACTGTATCTGCAAATGAACAGCCTGAGAGGCGAGGACACGGCTGTATATTACTGTGCGAGAGATGGGGAGCAGCT
CGTCGATTACTATTACTACTACGTTATGGACGTCTGGGGCCAAGGGACCACGGTCACCGTCTCCTCA
HCVR (V_{H}) Amino Acid Sequence
(SEQ ID NO: 271)
EVQLVESGGGLVQPGGSLRLSCTASGFTFSNYWMTWVRQAPGKGLEWVANIKEDGSEKEYVDSVKGRFTISRDNAKN
SLYLQMNSLRGEDTAVYYCARDGEQLVDYYYYYVMDVWGQGTTVTVSS
HCDR1:
(SEQ ID NO: 272)
GFTFSNYW
HCDR2:
(SEQ ID NO: 273)
IKEDGSEK
HCDR3:
(SEQ ID NO: 274)
ARDGEQLVDYYYYYVMDV
LCVR (V_{L}) Nucleotide Sequence
(SEQ ID NO: 275)
GACATCCAGATGACCCAGTCTCCATCTTCCGTGTCTGCATCTGTTGGAGACAGAGTCACCATCACTTGTCGGGCGAG
TCAGGGTATTAGCAGCTGGTTAGCCTGGTATCAGCAGAAACCAGGGAAAGCCCCTAAGCTCCTGATCTATGCTGCAT
CCAGTTTGCAAAGTGGGGTCCCATCAAGGTTCAGCGGCAGTGGATCTGGGACAGATTTCACTCTCACCATCAGCAGC
CTGCAGCCTGAAGATTTTGCAACTTACTATTGTCAAAAGGCTGACAGTCTCCCGTACGCTTTTGGCCAGGGGACCAA
GCTGGAGATCAAA
LCVR (V_{L}) Amino Acid Sequence
(SEQ ID NO: 276)
DIQMTQSPSSVSASVGDRVTITCRASQGISSWLAWYQQKPGKAPKLLIYAASSLQSGVPSRFSGSGSGTDFTLTISS
LQPEDFATYYCQKADSLPYAFGQGTKLEIK
LCDR1:
(SEQ ID NO: 277)
QGISSW
LCDR2:
(SEQ ID NO: 278)
AAS
LCDR3:
(SEQ ID NO: 279)
QKADSLPYA
12795B
HCVR (V_{H}) Nucleotide Sequence
(SEQ ID NO: 280)
GAGGTGCAGCTGGTGGAGTCTGGGGGAGGCTTGGTTCAGCCTGGGGGGTCCCTGAGACTCTCCTGTGCAACCTCTGG
ATTCACCTTTACCAGCTATGACATGAAGTGGGTCCGCCAGGCTCCAGGGCTGGGCCTGGAGTGGGTCTCAGCTATTA
GTGGTAGTGGTGGTAACACATACTACGCAGACTCCGTGAAGGGCCGGTTCACCATCTCCAGAGACAATTCCAGGAAC
ACGCTGTATCTGCAAATGAACAGCCTGAGAGCCGAGGACACGGCCGTATATTACTGTACGAGGTCCCATGACTTCGG
TGCCTTCGACTACTTTGACTACTGGGGCCAGGGAACCCTGGTCACCGTCTCCTCA
HCVR (V_{H}) Amino Acid Sequence
(SEQ ID NO: 281)
EVQLVESGGGLVQPGGSLRLSCATSGFTFTSYDMKWVRQAPGLGLEWVSAISGSGGNTYYADSVKGRFTISRDNSRN
TLYLQMNSLRAEDTAVYYCTRSHDFGAFDYFDYWGQGTLVTVSS
or
(SEQ ID NO: 692)
EVQLVQSGGGLVQPGGSLRLSCATSGFTFTSYDMKWVRQAPGLGLEWVSAISGSGGNTYYADSVKGRFTISRDNSRN
TLYLQMNSLRAEDTAVYYCTRSHDFGAFDYFDYWGQGTMVTVSS
HCDR1:
(SEQ ID NO: 282)
GFTFTSYD
HCDR2:
(SEQ ID NO: 283)
ISGSGGNT
HCDR3:
(SEQ ID NO: 284)
TRSHDFGAFDYFDY
LCVR (V_{L}) Nucleotide Sequence
(SEQ ID NO: 285)
GACATCCAGATGACCCAGTCTCCATCCTCCCTGTCTGCATCTGTGGGAGACAGAGTCACCATCACTTGCCGGGCAAG
TCAGGGCATTAGAGATCATTTTGGCTGGTATCAGCAGAAACCAGGGAAAGCCCCTAAGCGCCTGATCTATGCTGCAT
CCAGTTTGCACAGTGGGGTCCCATCAAGGTTCAGCGGCAGTGGATCTGGGACAGAATTCACTCTCACAATCAGCAGC
TTGCAGCCTGAAGATTTTGCAACCTATTACTGTCTACAGTATGATACTTACCCGCTCACTTTCGGCGGAGGGACCAA
GGTGGAGATCAAA
LCVR (V_{L}) Amino Acid Sequence
(SEQ ID NO: 286)
DIQMTQSPSSLSASVGDRVTITCRASQGIRDHFGWYQQKPGKAPKRLIYAASSLHSGVPSRFSGSGSGTEFTLTISS
LQPEDFATYYCLQYDTYPLTFGGGTKVEIK
or
(SEQ ID NO: 693)
DIQLTQSPSSLSASVGDRVTITCRASQGIRDHFGWYQQKPGKAPKRLIYAASSLHSGVPSRFSGSGSGTEFTLTISS
LQPEDFATYYCLQYDTYPLTFGGGTKVEIK
LCDR1:
(SEQ ID NO: 287)
QGIRDH
LCDR2:
(SEQ ID NO: 288)
AAS
LCDR3:
(SEQ ID NO: 289)
LQYDTYPLT
12798B (REGN17078 Fab; REGN17072 scFv; REGN16818)
HCVR (V_{H}) Nucleotide Sequence
(SEQ ID NO: 290)
GAAGTGCAGCTGGTGGAGTCTGGGGGAGACTTGGTACAGCCTGGCAGGTCCCTGAGACTCTCCTGTGCAGCCTCTGG
ATTCACCTTTGATGATTATGCCATGCACTGGGTCCGGCAAGCTCCAGGGAAGGGCCTGGAGTGGGTCTCAGGTATTA
GTTGGAATAGTGCTACCAGAGTCTATGCGGACTCTGTGAAGGGCCGATTCACCATCTCCAGAGACAACGCCAAGAAT
TTCCTGTATCTGCAAATGAACAGTCTGAGATCTGAGGACACGGCCTTGTATCACTGTGCAAAAGATATGGATATCTC
GCTAGGGTACTACGGTTTGGACGTCTGGGGCCAAGGGACCACGGTCACCGTCTCCTCA
HCVR (V_{H}) Amino Acid Sequence
(SEQ ID NO: 291)
EVQLVESGGDLVQPGRSLRLSCAASGFTFDDYAMHWVRQAPGKGLEWVSGISWNSATRVYADSVKGRFTISRDNAKN
FLYLQMNSLRSEDTALYHCAKDMDISLGYYGLDVWGQGTTVTVSS
HCDR1:
(SEQ ID NO: 292)
GFTFDDYA
HCDR2:
(SEQ ID NO: 293)
ISWNSATR
HCDR3:
(SEQ ID NO: 294)
AKDMDISLGYYGLDV
LCVR (V_{L}) Nucleotide Sequence
(SEQ ID NO: 295)
GAAATAGTGATGACGCAGTCTCCAGCCACCCTGTCTGTGTCTCCAGGGGAAAGAGCCACCCTCTCCTGCAGGGCCAG
TCAGACTGTTAGCAGCAACTTAGCCTGGTATCAGCAGAAACCTGGCCAGGCTCCCAGGCTCCTCATCTATGGTTCAT
CCTCCAGGGCCACTGGTATCCCAGCCAGGTTCAGTGGCAGTGGGTCTGGGACAGAGTTCACTCTCACCATCAGCAGC
CTGCAGTCTGAAGATTTTGCAGTTTATTACTGTCAGCAGTATAATAACTGGCCTCCCTACACTTTTGGCCAGGGGAC
CAAGCTGGAGATCAAA
LCVR (V_{L}) Amino Acid Sequence
(SEQ ID NO: 296)
EIVMTQSPATLSVSPGERATLSCRASQTVSSNLAWYQQKPGQAPRLLIYGSSSRATGIPARFSGSGSGTEFTLTISS
LQSEDFAVYYCQQYNNWPPYTFGQGTKLEIK
LCDR1:
(SEQ ID NO: 297)
QTVSSN
LCDR2:
(SEQ ID NO: 298)
GSS
LCDR3:
(SEQ ID NO: 299)
QQYNNWPPYT
12799B (REGN17079 Fab; REGN17073 scFv; REGN16819)
HCVR (V_{H}) Nucleotide Sequence
(SEQ ID NO: 300)
CAGATCACCTTGAAGGAGTCTGGTCCTACGCTGGTGAAACCCACACAGACCCTCACGCTGACCTGCACCTTCTCTGG
GTTCTCACTCAGCACTAGTGGAGTGGGTGTGGTCTGGATCCGTCAGCCCCCCGGAAAGGCCCTGGAGTGGCTTGCAC
TCATTTATTGGAATGATCATAAGCGGTACAGCCCATCTCTGGGGAGCAGGCTCACCATCACCAAGGACACCTCCAAA
AACCAGGTGGTCCTTACAATGACCAACATGGACCCTGTGGACACAGCCACATATTACTGTGCACACTACAGTGGGAG
CTATTCCTACTACTACTATGGTTTGGACGTCTGGGGCCAAGGGACCACGGTCACCGTCTCCTCA
HCVR (V_{H}) Amino Acid Sequence
(SEQ ID NO: 301)
QITLKESGPTLVKPTQTLTLTCTFSGFSLSTSGVGVVWIRQPPGKALEWLALIYWNDHKRYSPSLGSRLTITKDTSK
NQVVLTMTNMDPVDTATYYCAHYSGSYSYYYYGLDVWGQGTTVTVSS
HCDR1:
(SEQ ID NO: 302)
GFSLSTSGVG
HCDR2:
(SEQ ID NO: 303)
IYWNDHK
HCDR3:
(SEQ ID NO: 304)
AHYSGSYSYYYYGLDV
LCVR (V_{L}) Nucleotide Sequence
(SEQ ID NO: 305)
GACATCCAGATGACCCAGTCTCCATCTTCCGTGTCTGCATCTGTAGGAGACAGAGTCACCATCACTTGTCGGGCGAG
TCAGGGTATTGCCAGCTGGTTAGCCTGGTATCAGCAGAAACCAGGGAAAGCCCCTGAGCTCCTGATCTATGCTGCAT
CCAGTTTGCAAGGTGGGGTCCCATCAAGGTTCAGCGGCAGTGGATCTGGGACAGATTTCACTCTCACCATCAGCAGC
CTGCAGCCTGAAGATTTTGCAATTTACTATTGTCAACAGGCTAACTATTTCCCGTGGACGTTCGGCCAAGGGACCAA
GGTGGAAATCAAA
LCVR (V_{L}) Amino Acid Sequence
(SEQ ID NO: 306)
DIQMTQSPSSVSASVGDRVTITCRASQGIASWLAWYQQKPGKAPELLIYAASSLQGGVPSRFSGSGSGTDFTLTISS
LQPEDFAIYYCQQANYFPWTFGQGTKVEIK
LCDR1:
(SEQ ID NO: 307)
QGIASW
LCDR2:
(SEQ ID NO: 308)
AAS
LCDR3:
(SEQ ID NO: 309)
QQANYFPWT
12801B
HCVR (V_{H}) Nucleotide Sequence
(SEQ ID NO: 310)
GAGGTGCAGCTGTTGGAGTCTGGGGGAGCCTTGGTACAGCCTGGGGGGTCCCTGAGACTCTCCTGTGCAGCCTCTGG
ATTCACCTTTACCTCCTATGCCATGCACTGGGTCCGCCAGGCTCCAGGGAAGGGTCTGGAGTGGGTCTCATCTATTA
GAGGTAGTGGTGGTGGCACATACTCCGCAGACTCCGTGAAGGGCCGGTTCACCATCTCCAGAGACAATTCCAGGGAC
ACTCTATATCTGCAAATGAACAGTGTGAGAGCCGAGGACACGGCCGTTTATTACTGTGCGAGGTCCCATGACTACGG
TGCCTTCGACTTCTTTGACTACTGGGGCCAGGGAACCCTGGTCACCGTCTCCTCA
HCVR (V_{H}) Amino Acid Sequence
(SEQ ID NO: 311)
EVQLLESGGALVQPGGSLRLSCAASGFTFTSYAMHWVRQAPGKGLEWVSSIRGSGGGTYSADSVKGRFTISRDNSRD
TLYLQMNSVRAEDTAVYYCARSHDYGAFDFFDYWGQGTLVTVSS
or
(SEQ ID NO: 694)
EVQLLESGGALVQPGGSLRLSCAASGFTFTSYAMHWVRQAPGKGLEWVSSIRGSGGGTYSADSVKGRFTISRDNSRD
TLYLQMNSVRAEDTAVYYCARSHDYGAFDFFDYWGQGTTVTVSS
HCDR1:
(SEQ ID NO: 312)
GFTFTSYA
HCDR2:
(SEQ ID NO: 313)
IRGSGGGT
HCDR3:
(SEQ ID NO: 314)
ARSHDYGAFDFFDY
LCVR (V_{L}) Nucleotide Sequence
(SEQ ID NO: 315)
GACATCCAGATGACCCAGTCTCCATCCTCCCTGTCTGCATCTGTAGGAGACAGAGTCACCATCACTTGCCGGGCAAG
TCAGGGCATTAGAACTGATTTAGGCTGGTATCAGCAGAAACCAGGGAAAGCCCCTAAGCGCCTGATCTATGCTGCAT
CCAGTTTGCAAAGTGGGGTCCCATCAAGGTTCAGCGGCAGTGGATCTGGGACAGAATTCACTCTCACAATCAGCAGC
CTGCGGCCTGAAGATTTTGCAACTTTTTACTGTCTACAGTATAATAGTTACCCGCTCACTTTCGGCGGAGGGACCAA
GGTGGAGATCAAA
LCVR (V_{L}) Amino Acid Sequence
(SEQ ID NO: 316)
DIQMTQSPSSLSASVGDRVTITCRASQGIRTDLGWYQQKPGKAPKRLIYAASSLQSGVPSRFSGSGSGTEFTLTISS
LRPEDFATFYCLQYNSYPLTFGGGTKVEIK
or
(SEQ ID NO: 695)
DIQMTQSPSSLSASVGDRVTITCRASQGIRTDLGWYQQKPGKAPKRLIYAASSLQSGVPSRESGSGSGTEFTLTISS
LRPEDFATFYCLQYNSYPLTFGGGTKVDIK
LCDR1:
(SEQ ID NO: 317)
QGIRTD
LCDR2:
(SEQ ID NO: 318)
AAS
LCDR3:
(SEQ ID NO: 319)
LQYNSYPLT
12802B (REGN16820)
HCVR (V_{H}) Nucleotide Sequence
(SEQ ID NO: 320)
CAGGTGCAGCTGGTGGAGTCTGGGGGAGGCTTGGTCAAGCCTGGAGGGTCCCTGAGACTCTCCTGTGCAGCCTCTGG
ATTCACCTTCAGTGACTACTTCATGAGCTGGATCCGCCAGGCTCCAGGGAAGGGGCTGGAGTGGGTTTCATACATTA
GTAGTACTGGTAGTACCATAAATTATGCAGACTCTGTGAAGGGCCGATTCACCATCTCCAGGGACAATGTCAAGAAT
TCACTGTATCTGCAAATGACCAGCCTGAGAGTCGAGGACACGGCCGTGTATTACTGTACGAGAGATAACTGGAACTA
TGAATACTGGGGCCAGGGAACCCTGGTCACCGTCTCCTCA
HCVR (V_{H}) Amino Acid Sequence
(SEQ ID NO: 321)
QVQLVESGGGLVKPGGSLRLSCAASGFTFSDYFMSWIRQAPGKGLEWVSYISSTGSTINYADSVKGRFTISRDNVKN
SLYLQMTSLRVEDTAVYYCTRDNWNYEYWGQGTLVTVSS
HCDR1:
(SEQ ID NO: 322)
GFTFSDYF
HCDR2:
(SEQ ID NO: 323)
ISSTGSTI
HCDR3:
(SEQ ID NO: 324)
TRDNWNYEY
LCVR (V_{L}) Nucleotide Sequence
(SEQ ID NO: 325)
GAAATAGTGATGACGCAGTCTCCAGCCACCCTGTCTGTGTCTCCAGGGGAAAGAGCCACCCTCTCCTGCAGGGCCAG
TCAGAGTGTTAGCATCAACTTAGCCTGGTACCAGCAGAAACCTGGCCAGGCTCCCAGGCTCCTCATCTTTGTTGCAT
CCACCAGGGCCACTGGTATCCCAGCCAGGTTCAGTGGCAGTGGGTCTGGGACAGAGTTCACTCTCACCATCAGCAGC
CTGCAGTCTGAAGATTTTGCAACTTATTACTGTCAGCAGTATGATATCTGGCCGTACACTTTTGGCCAGGGGACCAA
GCTGGAGATCAAA
LCVR (V_{L}) Amino Acid Sequence
(SEQ ID NO: 326)
EIVMTQSPATLSVSPGERATLSCRASQSVSINLAWYQQKPGQAPRLLIFVASTRATGIPARFSGSGSGTEFTLTISS
LQSEDFATYYCQQYDIWPYTFGQGTKLEIK
LCDR1:
(SEQ ID NO: 327)
QSVSIN
LCDR2:
(SEQ ID NO: 328)
VAS
LCDR3:
(SEQ ID NO: 329)
QQYDIWPYT
12808B
HCVR (V_{H}) Nucleotide Sequence
(SEQ ID NO: 330)
CAGCTGCAGCTGCAGGAGTCGGGCCCAGGACTGGTGAAGCCTTCGGAGACCCTGTCCCTCACCTGCACTGTGTCTGG
TGAATCCATCAGCAGTAATACTTACTACTGGGGCTGGATCCGCCAGCCCCCAGGGAAGGGGCTGGAATGGATTGGGA
GTATCGATTATAGTGGGACCACCAATTATAACCCGTCCCTCAAGAGTCGAGTCACCATATCCGTAGACACGTCCAGG
AATCACTTCTCCCTGAGGCTGAGGTCTGTGACCGCCGCAGACACGGCTGTGTATTACTGTGCGAGAGAGTGGGGAAA
CTACGGCTACTATTACGGTATGGACGTTTGGGGCCAAGGGACCACGGTCACCGTCTCCTCA
HCVR (V_{H}) Amino Acid Sequence
(SEQ ID NO: 331)
QLQLQESGPGLVKPSETLSLTCTVSGESISSNTYYWGWIRQPPGKGLEWIGSIDYSGTTNYNPSLKSRVTISVDTSR
NHFSLRLRSVTAADTAVYYCAREWGNYGYYYGMDVWGQGTTVTVSS
or
(SEQ ID NO: 696)
QVQLVESGPGLVKPSETLSLTCTVSGESISSNTYYWGWIRQPPGKGLEWIGSIDYSGTTNYNPSLKSRVTISVDTSR
NHFSLRLRSVTAADTAVYYCAREWGNYGYYYGMDVWGQGTTVTVSS
HCDR1:
(SEQ ID NO: 332)
GESISSNTYY
HCDR2:
(SEQ ID NO: 333)
IDYSGTT
HCDR3:
(SEQ ID NO: 334)
AREWGNYGYYYGMDV
LCVR (V_{L}) Nucleotide Sequence
(SEQ ID NO: 335)
GACATCCAGATGACCCAGTCTCCATCCTCCCTGTCTGCATCTGTAGGAGACAGAGTCACCATCAATTGCCGGGCAAG
TCAGGGCATTAGAAATGATTTAGGCTGGTATCAGCAGAAACCAGGGAAAGCCCCTAAGCGCCTGATCTATGCTGCAT
CCAGTTTGCAAAGTGGGGTCCCATTAAGGTTCAGTGGCAGTGGATCTGGGACAGAATTCACTCTCACAATCAACAAC
CTGCAGCCTGAAGATTTTGCAACTTATTACTGTCTATCGCATAATAGTTACCCGTGGACGTTCGGCCAAGGGACCAA
GGTGGAAATCAAA
LCVR (V_{L}) Amino Acid Sequence
(SEQ ID NO: 336)
DIQMTQSPSSLSASVGDRVTINCRASQGIRNDLGWYQQKPGKAPKRLIYAASSLQSGVPLRFSGSGSGTEFTLTINN
LQPEDFATYYCLSHNSYPWTFGQGTKVEIK
LCDR1:
(SEQ ID NO: 337)
QGIRND
LCDR2:
(SEQ ID NO: 338)
AAS
LCDR3:
(SEQ ID NO: 339)
LSHNSYPWT
12812B (REGN16821)
HCVR (V_{H}) Nucleotide Sequence
(SEQ ID NO: 340)
CAGGTGCAGCTGGTGCAGTCTGGGGCTGAGGTGAAGAAGCCTGGGTCCTCGGTGAGGGTCTCCTGCAAGGCTTCTAG
AGGCACCTTCAGCAGCTATGCTATCAGCTGGGTGCGACAGGCCCCTGGACAAGGCCTTGAGTGGATGGGAGGGATCA
TCCCCATCTTTGGTACAGCAAACTACGCACAGAAGTTCCTGGCCAGAGTCACGATTACCGCGGACGAATCCACGAGC
ACAGCCTACATGGAGCTGAGCAGCCTGAGATCTGAGGACACGGCCGTGTATTACTGTGCGAGAGAGAAGGGGTGGAA
CTACTTTGACTACTGGGGCCAGGGAACCCTGGTCACCGTCTCCTCA
HCVR (V_{H}) Amino Acid Sequence
(SEQ ID NO: 341)
QVQLVQSGAEVKKPGSSVRVSCKASRGTFSSYAISWVRQAPGQGLEWMGGIIPIFGTANYAQKFLARVTITADFSTS
TAYMELSSLRSEDTAVYYCAREKGWNYFDYWGQGTLVTVSS
HCDR1:
(SEQ ID NO: 342)
RGTFSSYA
HCDR2:
(SEQ ID NO: 343)
IIPIFGTA
HCDR3:
(SEQ ID NO: 344)
AREKGWNYFDY
LCVR (V_{L}) Nucleotide Sequence
(SEQ ID NO: 345)
GACATCCAGATGACCCAGTCTCCACCTTCCGTGTCTGCATCTGTAGGAGACAGAGTCACCATCACTTGTCGGGCGAG
TCAGGGTATTAGCAGCTGGTTAGCCTGGTATCAGCAGAAACCAGGGAAAGCCCCTAAACTCCTGATCTATGCTGCAT
CCAGTTTGCAAAGTGGGGTCCCATCAAGGTTCAGCGGCAGTGGATCTGGGACAGATTTCACTCTCACCATCAGCAGC
CTGCAGCCTGAAGATTTTGCAACTTACTATTGTCAACAGGCTAACAGTTTCCCTCGGACGTTCGGCCAAGGGACCAA
GGTGGAAATCAAA
LCVR (V_{L}) Amino Acid Sequence
(SEQ ID NO: 346)
DIQMTQSPPSVSASVGDRVTITCRASQGISSWLAWYQQKPGKAPKLLIYAASSLQSGVPSRFSGSGSGTDFTLTISS
LQPEDFATYYCQQANSFPRTFGQGTKVEIK
LCDR1:
(SEQ ID NO: 347)
QGISSW
LCDR2:
(SEQ ID NO: 348)
AAS
LCDR3:
(SEQ ID NO: 349)
QQANSFPRT
12816B
HCVR (V_{H}) Nucleotide Sequence
(SEQ ID NO: 350)
CAGGTGCAGCTGGTGGAGTCTGGGGGAGGCTTGGTCAAGCCTGGAGGGTCCCTGAGACTCTCCTGTGCAGCCTCTGG
ATTCACCTTCAGTGACTACTACATGAACTGGATCCGCCAGGCTCCAGGGAAGGGGCTGGAGTGGGTTTCATACATTA
GTAGTAGTGGGACTACCATATACTACGCAGACTCTGTGAAGGGCCGATTCACCATCTCCAGGGACAACGCCAAGAAA
TCACTGTATCTGGAGATGAACAGCCTCAGAGCCGAGGACACGGCCGTGTACTACTGTGCGAGAGAGGGGTACGGTAA
TGACTACTATTACTACGGTATAGACGTCTGGGGCCAAGGGACCACGGTCACCGTCTCCTCA
HCVR (V_{H}) Amino Acid Sequence
(SEQ ID NO: 351)
QVQLVESGGGLVKPGGSLRLSCAASGFTFSDYYMNWIRQAPGKGLEWVSYISSSGTTIYYADSVKGRFTISRDNAKK
SLYLEMNSLRAEDTAVYYCAREGYGNDYYYYGIDVWGQGTTVTVSS
or
(SEQ ID NO: 697)
EVQLVESGGGLVKPGGSLRLSCAASGFTFSDYYMNWIRQAPGKGLEWVSYISSSGTTIYYADSVKGRFTISRDNAKK
SLYLEMNSLRAEDTAVYYCAREGYGNDYYYYGIDVWGQGTTVTVSS
HCDR1:
(SEQ ID NO: 352)
GFTFSDYY
HCDR2:
(SEQ ID NO: 353)
ISSSGTTI
HCDR3:
(SEQ ID NO: 354)
AREGYGNDYYYYGIDV
LCVR (V_{L}) Nucleotide Sequence
(SEQ ID NO: 355)
GATATTGTGATGACTCAGTCTCCACTCTCCCTGCCCGTCACCCCTGGAGAGCCGGCCTCCATCTCCTGCAGGTCTAG
TCAGAGCCTCCTGCATGGTAATGGATACAACTATTTGACTTGGTACCTGCAGAAGCCAGGGCAGTCTCCACAGCTCC
TGATCTATTTGGGTTCTAATCGGGCCTCCGGGGTCCCTGACAGGTTCAGTGGCAGTGGATCAGGCACAGATTTTACA
CTGAAAATAAGCAGAGTGGAGGCTGAGGATGTTGGGGTTTATTACTGCATGCAAGCTCTACAAACTCCGTACACTTT
TGGCCAGGGGACCAAGCTGGAGATCAAA
LCVR (V_{L}) Amino Acid Sequence
(SEQ ID NO: 356)
DIVMTQSPLSLPVTPGEPASISCRSSQSLLHGNGYNYLTWYLQKPGQSPQLLIYLGSNRASGVPDRFSGSGSGTDFT
LKISRVEAEDVGVYYCMQALQTPYTFGQGTKLEIK
or
(SEQ ID NO: 698)
DIQLTQSPLSLPVTPGEPASISCRSSQSLLHGNGYNYLTWYLQKPGQSPQLLIYLGSNRASGVPDRFSGSGSGTDFT
LKISRVEAEDVGVYYCMQALQTPYTFGQGTKVEIK
LCDR1:
(SEQ ID NO: 357)
QSLLHGNGYNY
LCDR2:
(SEQ ID NO: 358)
LGS
LCDR3:
(SEQ ID NO: 359)
MQALQTPYT
12833B
HCVR (V_{H}) Nucleotide Sequence
(SEQ ID NO: 360)
CAGGTGCAGCTGGTGGAGTCTGGGGGAGGCGTGGTCCAGCCTGGGAGGTCCCTGAGACTCTCCTGTGCAGCCTCTGG
ATTCACCTTCAGTAGCTTTGGCATGCACTGGGTCCGCCAGGCTCCAGGCAAGGGGCTGGAGTGGGTGATATTTATAT
CATATGATGGAAGTGATAAATACTATGCAGACTCCGTGAAGGGCCGATTCGCCATCTCCAGAGACAGTTCCAAGAAC
ACGCTATATCTGCAAATGAACAGCCTGAGAGCTGAGGACACGGCTGTGTATTACTGTGCGAAAGAAAACGGTATTTT
GACTGATTCCTACGGTATGGACGTCTGGGGCCAAGGGACCACGGTCACCGTCTCCTCA
HCVR (V_{H}) Amino Acid Sequence
(SEQ ID NO: 361)
QVQLVESGGGVVQPGRSLRLSCAASGFTFSSFGMHWVRQAPGKGLEWVIFISYDGSDKYYADSVKGRFAISRDSSKN
TLYLQMNSLRAEDTAVYYCAKENGILTDSYGMDVWGQGTTVTVSS
or
(SEQ ID NO: 699)
EVQLVESGGGVVQPGRSLRLSCAASGFTFSSFGMHWVRQAPGKGLEWVIFISYDGSDKYYADSVKGRFAISRDSSKN
TLYLQMNSLRAEDTAVYYCAKENGILTDSYGMDVWGQGTTVTVSS
HCDR1:
(SEQ ID NO: 362)
GFTFSSFG
HCDR2:
(SEQ ID NO: 363)
ISYDGSDK
HCDR3:
(SEQ ID NO: 364)
AKENGILTDSYGMDV
LCVR (V_{L}) Nucleotide Sequence
(SEQ ID NO: 365)
GACATCCAGATGACCCAGTCTCCATCCTCCCTGTCTGCATCTGTAGGAGACAGAGTCACCATCACTTGCCGGGCAAG
TCAGAGCATTAGCAGCTATTTAAATTGGTATCAGCAGAAACCAGGGAAAGCCCCTAAGCTCCTGATCTATGCTGCAT
CCAGTTTGCAAAGTGGGGTCCCGTCAAGGTTCAGTGGCAGTGGATCTGGGACAGATTTCACTCTCACCATCAGCAGT
CTGCAACCTGAAGATTTTGCAACTTACTACTGTCAACAGAGTTACAGTACCCCTCCGATCACCTTCGGCCAAGGGAC
ACGACTGGAGATTAAA
LCVR (V_{L}) Amino Acid Sequence
(SEQ ID NO: 366)
DIQMTQSPSSLSASVGDRVTITCRASQSISSYLNWYQQKPGKAPKLLIYAASSLQSGVPSRFSGSGSGTDFTLTISS
LQPEDFATYYCQQSYSTPPITFGQGTRLEIK
LCDR1:
(SEQ ID NO: 367)
QSISSY
LCDR2:
(SEQ ID NO: 368)
AAS
LCDR3:
(SEQ ID NO: 369)
QQSYSTPPIT
12834B
HCVR (V_{H}) Nucleotide Sequence
(SEQ ID NO: 370)
CAGGTTCAGCTGGTGCAGTCTGGAGCTGAGGTGAAGAAGCCTGGGGCCTCTGTGAAGGTCTCCTGCAAGGCTTCTGG
TTACACCTTTACCAGCTATGGTATCAGCTGGGTGCGACAGGCCCCTGGACAAGGGCTTGAGTGGATGGGATGGATCA
GTGTTTACCATGGTAACACAAACTATGCACAGAAGTTCCAGGGCAGAGTCACCATGACCACAGACACATCCACGAGC
ACAGCCTACATGGAGCTGAGGAGCCTGAGATCTGACGACACGGCCGTGTATTACTGTGCGAGAGAGGGGTATTACGA
TTTTTGGAGTGGTTATTACCCTTTTGACTACTGGGGCCAGGGAACCCTGGTCACCGTCTCCTCA
HCVR (V_{H}) Amino Acid Sequence
(SEQ ID NO: 371)
QVQLVQSGAEVKKPGASVKVSCKASGYTFTSYGISWVRQAPGQGLEWMGWISVYHGNTNYAQKFQGRVTMTTDTSTS
TAYMELRSLRSDDTAVYYCAREGYYDFWSGYYPFDYWGQGTLVTVSS
or
(SEQ ID NO: 700)
EVQLVESGAEVKKPGASVKVSCKASGYTFTSYGISWVRQAPGQGLEWMGWISVYHGNTNYAQKFQGRVTMTTDTSTS
TAYMELRSLRSDDTAVYYCAREGYYDFWSGYYPFDYWGQGTTVTVSS
HCDR1:
(SEQ ID NO: 372)
GYTFTSYG
HCDR2:
(SEQ ID NO: 373)
ISVYHGNT
HCDR3:
(SEQ ID NO: 374)
AREGYYDFWSGYYPFDY
LCVR (V_{L}) Nucleotide Sequence
(SEQ ID NO: 375)
GACATCCAGATGACCCAGTCTCCATCCTCCCTGTCTGCATCTGTAGGAGACAGAGTCACCATCACTTGCCGGGCAAG
TCAGAGCATTAGCAGCTATTTAAATTGGTATCAGCAGAAACCAGGGAAAGCCCCTAAGCTCCTGATCTATGCTGCAT
CCAGTTTGCAAAGTGGGGTCCCGTCAAGGTTCAGTGGCAGTGGATCTGGGACAGATTTCACTCTCACCATCAGCAGT
CTGCAACCTGAAGATTTTGCAACTTACTACTGTCAACAGAGTTACAGTACCCCTCCGATCACCTTCGGCCAAGGGAC
ACGACTGGAGATTAAA
LCVR (V_{L}) Amino Acid Sequence
(SEQ ID NO: 376)
DIQMTQSPSSLSASVGDRVTITCRASQSISSYLNWYQQKPGKAPKLLIYAASSLQSGVPSRFSGSGSGTDFTLTISS
LQPEDFATYYCQQSYSTPPITFGQGTRLEIK
LCDR1:
(SEQ ID NO: 377)
QSISSY
LCDR2:
(SEQ ID NO: 378)
AAS
LCDR3:
(SEQ ID NO: 379)
QQSYSTPPIT
12835B
HCVR (V_{H}) Nucleotide Sequence
(SEQ ID NO: 380)
GAGGTGCAGCTGGTGGAGTCTGGGGGAGGCTTGATACAACCTGGAGGGTCCCTGAGACTCTCCTGTGAAGCCTCTGG
ATTCACCTTCAGAAATTATGAAATGAATTGGGTCCGCCAGGCTCCAGGGAAGGGGCTGGAGTGGGTTTCATATATTA
GTAGTAGTGGTAATATGAAAGACTACGCAGAGTCTGTGAAGGGCCGATTCACCATCTCCAGAGACAATGTCAAGAAT
TCACTGCAGCTGCAAATGAACAGCCTGAGAGTCGAGGACACGGCTGTTTATTACTGTGCGAGAGACGAGTTTCCTTA
CGGAATGGACGTCTGGGGCCAAGGGACCACGGTCACCGTCTCCTCA
HCVR (V_{H}) Amino Acid Sequence
(SEQ ID NO: 381)
EVQLVESGGGLIQPGGSLRLSCEASGFTFRNYEMNWVRQAPGKGLEWVSYISSSGNMKDYAESVKGRFTISRDNVKN
SLQLQMNSLRVEDTAVYYCARDEFPYGMDVWGQGTTVTVSS
HCDR1:
(SEQ ID NO: 382)
GFTFRNYE
HCDR2:
(SEQ ID NO: 383)
ISSSGNMK
HCDR3:
(SEQ ID NO: 384)
ARDEFPYGMDV
LCVR (V_{L}) Nucleotide Sequence
(SEQ ID NO: 385)
GACATCCAGATGACCCAGTCTCCATCCTCCCTGTCTGCATCTGTAGGAGACAGAGTCACCATCACTTGCCGGGCAAG
TCAGAGCATTAGCAGCTATTTAAATTGGTATCAGCAGAAACCAGGGAAAGCCCCTAAGCTCCTGATCTATGCTGCAT
CCAGTTTGCAAAGTGGGGTCCCGTCAAGGTTCAGTGGCAGTGGATCTGGGACAGATTTCACTCTCACCATCAGCAGT
CTGCAACCTGAAGATTTTGCAACTTACTACTGTCAACAGAGTTACAGTACCCCTCCGATCACCTTCGGCCAAGGGAC
ACGACTGGAGATTAAA
LCVR (V_{L}) Amino Acid Sequence
(SEQ ID NO: 386)
DIQMTQSPSSLSASVGDRVTITCRASQSISSYLNWYQQKPGKAPKLLIYAASSLQSGVPSRFSGSGSGTDFTLTISS
LQPEDFATYYCQQSYSTPPITFGQGTRLEIK
LCDR1:
(SEQ ID NO: 387)
QSISSY
LCDR2:
(SEQ ID NO: 388)
AAS
LCDR3:
(SEQ ID NO: 389)
QQSYSTPPIT
12847B (REGN17083 anti-hTfR Fab; REGN17077 anti-hTfR scFv; REGN16826)
HCVR (V_{H}) Nucleotide Sequence
(SEQ ID NO: 390)
GAAGTGCAGCTGGTGGAGTCTGGGGGAGGCTTGGTTCAGCCTGGCAGGTCCCTGAGACTCTCCTGTGCAGCCTCTGG
ATTCACCTTTGATGATTATGCCATGAACTGGGTCCGGCAAGCTCCAGGGAAGGGCCTGGAGTGGGTCTCAGGTATTA
GTTGGAGTAGTGGTAGCATGGACTATGCGGACTCTGTGAAGGGCCGATTCACCATCTCCAGAGACAACGCCAAAAAC
TCCCTGTATCTGCAAATGAACAGTCTGAGAACTGAGGACACGGCCTTATATTACTGTGCAAAAGCTAGGGAAGTTGG
AGACTACTACGGTATGGACGTCTGGGGCCAAGGGACCACGGTCACCGTCTCCTCA
HCVR (V_{H}) Amino Acid Sequence
(SEQ ID NO: 391)
EVQLVESGGGLVQPGRSLRLSCAASGFTFDDYAMNWVRQAPGKGLEWVSGISWSSGSMDYADSVKGRFTISRDNAKN
SLYLQMNSLRTEDTALYYCAKAREVGDYYGMDVWGQGTTVTVSS
HCDR1:
(SEQ ID NO: 392)
GFTFDDYA
HCDR2:
(SEQ ID NO: 393)
ISWSSGSM
HCDR3:
(SEQ ID NO: 394)
AKAREVGDYYGMDV
LCVR (V_{L}) Nucleotide Sequence
(SEQ ID NO: 395)
GACATCCAGATGACCCAGTCTCCATCCTCCCTGTCTGCATCTGTAGGAGACAGAGTCACCATCACTTGCCGGGCAAG
TCAGAGCATTAGCAGCTATTTAAATTGGTATCAGCAGAAACCAGGGAAAGCCCCTAAGCTCCTGATCTATGCTGCAT
CCAGTTTGCAAAGTGGGGTCCCGTCAAGGTTCAGTGGCAGTGGATCTGGGACAGATTTCACTCTCACCATCAGCAGT
CTGCAACCTGAAGATTTTGCAACTTACTACTGTCAACAGAGTTACAGTACCCCTCCGATCACCTTCGGCCAAGGGAC
ACGACTGGAGATTAAA
LCVR (V_{L}) Amino Acid Sequence
(SEQ ID NO: 396)
DIQMTQSPSSLSASVGDRVTITCRASQSISSYLNWYQQKPGKAPKLLIYAASSLQSGVPSRFSGSGSGTDFTLTISS
LQPEDFATYYCQQSYSTPPITFGQGTRLEIK
LCDR1:
(SEQ ID NO: 397)
QSISSY
LCDR2:
(SEQ ID NO: 398)
AAS
LCDR3:
(SEQ ID NO: 399)
QQSYSTPPIT
12848B (REGN16827)
HCVR (V_{H}) Nucleotide Sequence
(SEQ ID NO: 400)
GAAGTGCAGCTGGTGGAGTCTGGGGGAGGCTTGGTACAGCCTGGCAGGTCCCTGACACTCTCCTGTGCAGCCTCTGG
ATTCACCTTTGATAATTTTGGCATGCACTGGGTCCGGCAAGGTCCAGGGAAGGGCCTGGAATGGGTCTCAGGTCTTA
CTTGGAATAGTGGTGTCATAGGCTATGCGGACTCTGTGAAGGGCCGATTCACCATCTCCAGAGACAACGCCAAGAAC
TCCCTGTATCTGCAAATGAACAGTCTGAGACCTGAGGACACGGCCTTATATTACTGTGCAAAAGATATACGGAATTA
CGGCCCCTTTGACTACTGGGGCCAGGGAACCCTGGTCACCGTCTCCTCA
HCVR (V_{H}) Amino Acid Sequence
(SEQ ID NO: 401)
EVQLVESGGGLVQPGRSLTLSCAASGFTFDNFGMHWVRQGPGKGLEWVSGLTWNSGVIGYADSVKGRFTISRDNAKN
SLYLQMNSLRPEDTALYYCAKDIRNYGPFDYWGQGTLVTVSS
HCDR1:
(SEQ ID NO: 402)
GFTFDNFG
HCDR2:
(SEQ ID NO: 403)
LTWNSGVI
HCDR3:
(SEQ ID NO: 404)
AKDIRNYGPFDY
LCVR (V_{L}) Nucleotide Sequence
(SEQ ID NO: 405)
GAAATTGTGTTGACGCAGTCTCCAGGCACCCTGTCTTTGTCTCCAGGGGAAAGAGCCACCCTCTCCTGCAGGGCCAG
TCAGAGTGTTAGCAGCAGCTACTTAGCCTGGTACCAGCAGAAACCTGGCCAGGCTCCCAGGCTCCTCATCTATGGTG
CATCCAGCAGGGCCACTGGCATCCCAGACAGGTTCAGTGGCAGTGGGTCTGGGACAGACTTCACTCTCACCATCAGC
AGACTGGAGCCTGAAGATTTTGCAGTGTATTACTGTCAGCAGTATGGTAGCTCACCTTGGACGTTCGGCCAAGGGAC
CAAGGTGGAAATCAAA
LCVR (V_{L}) Amino Acid Sequence
(SEQ ID NO: 406)
EIVLTQSPGTLSLSPGERATLSCRASQSVSSSYLAWYQQKPGQAPRLLIYGASSRATGIPDRFSGSGSGTDFTLTIS
RLEPEDFAVYYCQQYGSSPWTFGQGTKVEIK
LCDR1:
(SEQ ID NO: 407)
QSVSSSY
LCDR2:
(SEQ ID NO: 408)
GAS
LCDR3:
(SEQ ID NO: 409)
QQYGSSPWT
12843B (REGN17075 anti-hTfR scFv; REGN16824; REGN17081 anti-hTfR Fab)
HCVR (V_{H}) Nucleotide Sequence
(SEQ ID NO: 410)
GAGGTGCAGCTGGTGGAGTCTGGGGGAGGCTTAGTACAGCCTGGAGGGTCCCTAAGACTCTCCTGTGCAGCCTCTGG
ATTCACCTTCAATATTTTTGAAATGAACTGGGTCCGCCAGGCTCCAGGGAAGGGGCTGGAGTGGATTTCCTACATTA
GTAGTCGTGGAACTACCACATACTACGCAGACTCTGTGAGGGGCCGATTCACCATCTCCAGAGACAACGCCAAGAAC
TCACTGTATCTGCAAATGAACAGCCTGAGAGCCGAGGACACGGCTGTTTATTACTGTGCGAGAGATTATGAAGCAAC
AATCCCTTTTGACTTCTGGGGCCAGGGAACCCTGGTCACCGTCTCCTCA
HCVR (V_{H}) Amino Acid Sequence
(SEQ ID NO: 411)
EVQLVESGGGLVQPGGSLRLSCAASGFTFNIFEMNWVRQAPGKGLEWISYISSRGTTTYYADSVRGRFTISRDNAKN
SLYLQMNSLRAEDTAVYYCARDYEATIPFDFWGQGTLVTVSS
HCDR1:GFTFNIFE
(SEQ ID NO: 412)
HCDR2:
(SEQ ID NO: 413)
ISSRGTTT
HCDR3:
(SEQ ID NO: 414)
ARDYEATIPFDF
LCVR (V_{L}) Nucleotide Sequence
(SEQ ID NO: 415)
GACATCCAGATGACCCAGTCTCCATCCTCCCTGTCTGCATCTGTAGGAGACAGAGTCACCATCACTTGCCGGGCAAG
TCAGAGCATTAGCAGCTATTTAAATTGGTATCAGCAGAAACCAGGGAAAGCCCCTAAGCTCCTGATCTATGCTGCAT
CCAGTTTGCAAAGTGGGGTCCCGTCAAGGTTCAGTGGCAGTGGATCTGGGACAGATTTCACTCTCACCATCAGCAGT
CTGCAACCTGAAGATTTTGCAACTTACTACTGTCAACAGAGTTACAGTACCCCTCCGATCACCTTCGGCCAAGGGAC
ACGACTGGAGATTAAA
LCVR (V_{L}) Amino Acid Sequence
(SEQ ID NO: 416)
DIQMTQSPSSLSASVGDRVTITCRASQSISSYLNWYQQKPGKAPKLLIYAASSLQSGVPSRFSGSGSGTDFTLTISS
LQPEDFATYYCQQSYSTPPITFGQGTRLEIK
LCDR1:
(SEQ ID NO: 417)
QSISSY
LCDR2:
(SEQ ID NO: 418)
AAS
LCDR3:
(SEQ ID NO: 419)
QQSYSTPPIT
12844B
HCVR (V_{H}) Nucleotide Sequence
(SEQ ID NO: 420)
GAGGTGCAGCTGGTGGAGTCTGGGGGAAGTGTGGTACGGCCTGGGGGGTCCCTGAGACTCTCCTGTGAAGCCTCTGG
ATTCACCTTTGATGATTATGGCATGAGCTGGGTCCGCCAAGATCCAGGGAAGGGGCTGGAGTGGGTCTCTGGTATTA
ATTGGAATGGTGATAGAACAAATTATGCAGACTCTGTGAAGGGCCGATTCATCATTTCCAGAGACAACGCCAAGAAC
TCTGTGTATCTACAAATGAACAGTCTGAGAGCGGAGGACTCGGCCTTGTATCACTGTGCGAGAGATCAGGGACTCGG
AGTGGCAGCTACCCTTGACTACTGGGGCCAGGGAACCCTGGTCACCGTCTCCTCA
HCVR (V_{H}) Amino Acid Sequence
(SEQ ID NO: 421)
EVQLVESGGSVVRPGGSLRLSCEASGFTFDDYGMSWVRQDPGKGLEWVSGINWNGDRTNYADSVKGRFIISRDNAKN
SVYLQMNSLRAEDSALYHCARDQGLGVAATLDYWGQGTLVTVSS
or
(SEQ ID NO: 701)
EVQLVESGGSVVRPGGSLRLSCEASGFTFDDYGMSWVRQDPGKGLEWVSGINWNGDRTNYADSVKGRFIISRDNAKN
SVYLQMNSLRAEDSALYHCARDQGLGVAATLDYWGQGTMVTVSS
HCDR1:
(SEQ ID NO: 422)
GFTFDDYG
HCDR2:
(SEQ ID NO: 423)
INWNGDRT
HCDR3:
(SEQ ID NO: 424)
ARDQGLGVAATLDY
LCVR (V_{L}) Nucleotide Sequence
(SEQ ID NO: 425)
GACATCCAGATGACCCAGTCTCCATCCTCCCTGTCTGCATCTGTAGGAGACAGAGTCACCATCACTTGCCGGGCAAG
TCAGAGCATTAGCAGCTATTTAAATTGGTATCAGCAGAAACCAGGGAAAGCCCCTAAGCTCCTGATCTATGCTGCAT
CCAGTTTGCAAAGTGGGGTCCCGTCAAGGTTCAGTGGCAGTGGATCTGGGACAGATTTCACTCTCACCATCAGCAGT
CTGCAACCTGAAGATTTTGCAACTTACTACTGTCAACAGAGTTACAGTACCCCTCCGATCACCTTCGGCCAAGGGAC
ACGACTGGAGATTAAA
LCVR (V_{L}) Amino Acid Sequence
(SEQ ID NO: 426)
DIQMTQSPSSLSASVGDRVTITCRASQSISSYLNWYQQKPGKAPKLLIYAASSLQSGVPSRFSGSGSGTDFTLTISS
LQPEDFATYYCQQSYSTPPITFGQGTRLEIK
LCDR1:
(SEQ ID NO: 427)
QSISSY
LCDR2:
(SEQ ID NO: 428)
AAS
LCDR3:
(SEQ ID NO: 429)
QQSYSTPPIT
12845B (REGN17082 Fab; REGN17076 scFv; REGN16825)
HCVR (V_{H}) Nucleotide Sequence
(SEQ ID NO: 430)
GAGGTGCAGCTGGTGGAGTCTGGGGGAGGCTTGGTACAGCCTGGAGGGTCCCTGAGACTCTCCTGTGCAGCCTCTGG
ATTCACCGTCAGTAATTATGAAATGAACTGGGTCCGCCAGGCTCCAGGGAAGGGGCTGGAGTGGGTTTCATACATTA
GTAGTAGTACCAGTAACATATACTACGCAGACTCTGTGAAGGGCCGATTCACCATCTCCAGAGACAACGCCGAGAAC
TCACTGTATCTGCAGATGAACAGCCTGAGAGTCGAGGACACGGCTGTTTATTACTGTGTGAGAGATGGGATTGTAGT
AGTTCCAGTTGGTCGTGGATACTACTATTACGGTTTGGACGTCTGGGGCCAAGGGACCACGGTCACCGTCTCCTCA
HCVR (V_{H}) Amino Acid Sequence
(SEQ ID NO: 431)
EVQLVESGGGLVQPGGSLRLSCAASGFTVSNYEMNWVRQAPGKGLEWVSYISSSTSNIYYADSVKGRFTISRDNAEN
SLYLQMNSLRVEDTAVYYCVRDGIVVVPVGRGYYYYGLDVWGQGTTVTVSS
HCDR1:
(SEQ ID NO: 432)
GFTVSNYE
HCDR2:
(SEQ ID NO: 433)
ISSSTSNI
HCDR3:
(SEQ ID NO: 434)
VRDGIVVVPVGRGYYYYGLDV
LCVR (V_{L}) Nucleotide Sequence
(SEQ ID NO: 435)
GACATCCAGATGACCCAGTCTCCATCCTCCCTGTCTGCATCTGTAGGAGACAGAGTCACCATCACTTGCCGGGCAAG
TCAGAGCATTAGCAGCTATTTAAATTGGTATCAGCAGAAACCAGGGAAAGCCCCTAAGCTCCTGATCTATGCTGCAT
CCAGTTTGCAAAGTGGGGTCCCGTCAAGGTTCAGTGGCAGTGGATCTGGGACAGATTTCACTCTCACCATCAGCAGT
CTGCAACCTGAAGATTTTGCAACTTACTACTGTCAACAGAGTTACAGTACCCCTCCGATCACCTTCGGCCAAGGGAC
ACGACTGGAGATTAAA
LCVR (V_{L}) Amino Acid Sequence
(SEQ ID NO: 436)
DIQMTQSPSSLSASVGDRVTITCRASQSISSYLNWYQQKPGKAPKLLIYAASSLQSGVPSRFSGSGSGTDFTLTISS
LQPEDFATYYCQQSYSTPPITFGQGTRLEIK
LCDR1:
(SEQ ID NO: 437)
QSISSY
LCDR2:
(SEQ ID NO: 438)
AAS
LCDR3:QQSYSTPPIT
(SEQ ID NO: 439)
12839B (REGN17080 Fab; REGN17074 scFv; REGN16822)
HCVR (V_{H}) Nucleotide Sequence
(SEQ ID NO: 440)
CAGGTGCAGCTGGTGGAGTCTGGGGGAGGCGTGGTCCAGCCTGGAAGGTCCCTGAGACTCTCCTGCGCAGCCTCTGG
ATTCCCCTTTAGTAATTATGTCATGTATTGGGTCCGCCAGGCTCCAGGCAAGGGGCTGGAGTGGGTGGCTCTTATTT
TTTTTGACGGAAAGAAAAACTATCATGCAGACTCCGTGAAGGGCCGATTCACCATAACCAGAGACAATTCCAAAAAT
ATGTTATATCTGCAAATGAACAGCCTGAGACCTGAGGACGCGGCTGTGTATTACTGTGCGAAAATCCATTGTCCTAA
TGGTGTATGTTACAAGGGGTATTACGGAATGGACGTCTGGGGCCAAGGGACCACGGTCACCGTCTCCTCA
HCVR (V_{H}) Amino Acid Sequence
(SEQ ID NO: 441)
QVQLVESGGGVVQPGRSLRLSCAASGFPFSNYVMYWVRQAPGKGLEWVALIFFDGKKNYHADSVKGRFTITRDNSKN
MLYLQMNSLRPEDAAVYYCAKIHCPNGVCYKGYYGMDVWGQGTTVTVSS
HCDR1:
(SEQ ID NO: 442)
GFPFSNYV
HCDR2:
(SEQ ID NO: 443)
IFFDGKKN
HCDR3:
(SEQ ID NO: 444)
AKIHCPNGVCYKGYYGMDV
LCVR (V_{L}) Nucleotide Sequence
(SEQ ID NO: 445)
GACATCCAGATGACCCAGTCTCCATCCTCCCTGTCTGCATCTGTAGGAGACAGAGTCACCATCACTTGCCGGGCAAG
TCAGAGCATTAGCAGCTATTTAAATTGGTATCAGCAGAAACCAGGGAAAGCCCCTAAGCTCCTGATCTATGCTGCAT
CCAGTTTGCAAAGTGGGGTCCCGTCAAGGTTCAGTGGCAGTGGATCTGGGACAGATTTCACTCTCACCATCAGCAGT
CTGCAACCTGAAGATTTTGCAACTTACTACTGTCAACAGAGTTACAGTACCCCTCCGATCACCTTCGGCCAAGGGAC
ACGACTGGAGATTAAA
LCVR (V_{L}) Amino Acid Sequence
(SEQ ID NO: 446)
DIQMTQSPSSLSASVGDRVTITCRASQSISSYLNWYQQKPGKAPKLLIYAASSLQSGVPSRFSGSGSGTDFTLTISS
LQPEDFATYYCQQSYSTPPITFGQGTRLEIK
LCDR1:
(SEQ ID NO: 447)
QSISSY
LCDR2:
(SEQ ID NO: 448)
AAS
LCDR3:
(SEQ ID NO: 449)
QQSYSTPPIT
12841B (REGN16823)
HCVR (V_{H}) Nucleotide Sequence
(SEQ ID NO: 450)
GAGGTGCAGCTGGTGGAGTCTGGGGGAGGCTTGGTCCAGCCTGGGGGGTCCCTAAGACTCTCCTGTGCAGCCTCTGG
ATTCACCTTTAGTAACTATTGGATGAACTGGGTCCGCCAGGCTCCAGGGAAGGGACTGGAGTGGGTGGCCAATATAA
AAGAAGATGGAGGTAAGAAATTGTATGTGGACTCTGTGAAGGGCCGATTCACCATCTCCAGAGACAACGCCAAGAAC
TCACTGTTTCTGCAAATGAACAGCCTGAGAGCCGAGGACACGGCTGTGTATTATTGTGCGAGAGAAGATACAACTTT
GGTTGTGGACTACTACTACTACGGTATGGACGTCTGGGGCCAAGGGACCACGGTCACCGTCTCCTCA
HCVR (V_{H}) Amino Acid Sequence
(SEQ ID NO: 451)
EVQLVESGGGLVQPGGSLRLSCAASGFTFSNYWMNWVRQAPGKGLEWVANIKEDGGKKLYVDSVKGRFTISRDNAKN
SLFLQMNSLRAEDTAVYYCAREDTTLVVDYYYYGMDVWGQGTTVTVSS
HCDR1:
(SEQ ID NO: 452)
GFTFSNYW
HCDR2:
(SEQ ID NO: 453)
IKEDGGKK
HCDR3:AREDTTLVVDYYYYGMDV
(SEQ ID NO: 454)
LCVR (V_{L}) Nucleotide Sequence
(SEQ ID NO: 455)
GACATCCAGATGACCCAGTCTCCATCCTCCCTGTCTGCATCTGTAGGAGACAGAGTCACCATCACTTGCCGGGCAAG
TCAGAGCATTAGCAGCTATTTAAATTGGTATCAGCAGAAACCAGGGAAAGCCCCTAAGCTCCTGATCTATGCTGCAT
CCAGTTTGCAAAGTGGGGTCCCGTCAAGGTTCAGTGGCAGTGGATCTGGGACAGATTTCACTCTCACCATCAGCAGT
CTGCAACCTGAAGATTTTGCAACTTACTACTGTCAACAGAGTTACAGTACCCCTCCGATCACCTTCGGCCAAGGGAC
ACGACTGGAGATTAAA
LCVR (V_{L}) Amino Acid Sequence
(SEQ ID NO: 456)
DIQMTQSPSSLSASVGDRVTITCRASQSISSYLNWYQQKPGKAPKLLIYAASSLQSGVPSRFSGSGSGTDFTLTISS
LQPEDFATYYCQQSYSTPPITFGQGTRLEIK
LCDR1:
(SEQ ID NO: 457)
QSISSY
LCDR2:
(SEQ ID NO: 458)
AAS
LCDR3:
(SEQ ID NO: 459)
QQSYSTPPIT
12850B (REGN16828)
HCVR (V_{H}) Nucleotide Sequence
(SEQ ID NO: 460)
CAGGTCCAGCTGGTGCAGTCTGGGGCTGAGGTGAAGAAGCCTGGGTCCTCGGTGAAGGTCTCCTGCAAGGCTTCTGG
AGGCACCTTCAACACCTATGCTATCACCTGGGTGCGACAGGCCCCTGGACAAGGGCTTGAATGGATGGGGGGAATCA
TCCCTATCTCTGGCATAGCAGAGTACGCACAGAAGTTCCAGGGCAGAGTCACGATCACCACGGATGACTCCTCGACC
ACAGCCTACATGGAACTGAACAGTCTGAGATCTGAGGACACGGCCGTGTATTACTGTGCGAGCTGGAACTACGCACT
CTACTACTTCTACGGTATGGACGTCTGGGGCCGAGGGACCACGGTCACCGTCTCCTCA
HCVR (V_{H}) Amino Acid Sequence
(SEQ ID NO: 461)
QVQLVQSGAEVKKPGSSVKVSCKASGGTFNTYAITWVRQAPGQGLEWMGGIIPISGIAEYAQKFQGRVTITTDDSST
TAYMELNSLRSEDTAVYYCASWNYALYYFYGMDVWGRGTTVTVSS
HCDR1:
(SEQ ID NO: 462)
GGTFNTYA
HCDR2:
(SEQ ID NO: 463)
IIPISGIA
HCDR3:
(SEQ ID NO: 464)
ASWNYALYYFYGMDV
LCVR (V_{L}) Nucleotide Sequence
(SEQ ID NO: 465)
GAAATTGTGTTGACGCAGTCTCCAGGCACCCTGTCTTTGTCTCCAGGGGAAAGAGCCACCCTCTCCTGCAGGGCCAG
TCAGAGTGTTAGCAGCAGCTACTTAGCCTGGTACCAGCAGAAACCTGGCCAGGCTCCCAGGCTCCTCATCTATGGTG
CATCCAGCAGGGCCACTGGCATCCCAGACAGGTTCAGTGGCAGTGGGTCTGGGACAGACTTCACTCTCACCATCAGC
AGACTGGAGCCTGAAGATTTTGCAGTGTATTACTGTCAGCAGTATGGTAGCTCACCTTGGACGTTCGGCCAAGGGAC
CAAGGTGGAAATCAAA
LCVR (V_{L}) Amino Acid Sequence
(SEQ ID NO: 466)
EIVLTQSPGTLSLSPGERATLSCRASQSVSSSYLAWYQQKPGQAPRLLIYGASSRATGIPDRFSGSGSGTDFTLTIS
RLEPEDFAVYYCQQYGSSPWTFGQGTKVEIK
LCDR1:
(SEQ ID NO: 467)
QSVSSSY
LCDR2:
(SEQ ID NO: 468)
GAS
LCDR3:
(SEQ ID NO: 469)
QQYGSSPWT
69261
HCVR (V_{H}) Nucleotide Sequence
(SEQ ID NO: 470)
CAGGTGCAGCTGGTGGAGTCTGGGGGAGGCTTGGTCAAGCCTGGAGGGTCCCTGAGACTCTCCTGTGCAGCCTCTGG
ATTCACCTTCAGTGTCTATTACATGAACTGGATCCGCCAGGCTCCAGGGAAGGGCCTGGAGTGGGTTTCATACATTA
GTAGTAGTGGTAGTACCATATACTACGCAGACTCTGTGAAGGGCCGATTCACCATCTCCAGGGACAACGCCAAGAAC
TCACTGTATCTCCAAATGAACAGTCTGAGAGCCGAGGACACGGCCGTATATTACTGTGGGAGAGAAGGGTATAGTGG
GACTTATTCTTATTACGGTATGGACGTCTGGGGCCAAGGGACCACGGTCACCGTCTCCTCA
HCVR (V_{H}) Amino Acid Sequence
(SEQ ID NO: 471)
QVQLVESGGGLVKPGGSLRLSCAASGFTFSVYYMNWIRQAPGKGLEWVSYISSSGSTIYYADSVKGRFTISRDNAKN
SLYLQMNSLRAEDTAVYYCGREGYSGTYSYYGMDVWGQGTTVTVSS
or
(SEQ ID NO: 702)
EVQLVESGGGLVKPGGSLRLSCAASGFTFSVYYMNWIRQAPGKGLEWVSYISSSGSTIYYADSVKGRFTISRDNAKN
SLYLQMNSLRAEDTAVYYCGREGYSGTYSYYGMDVWGQGTTVTVSS
HCDR1:
(SEQ ID NO: 472)
GFTFSVYY
HCDR2:
(SEQ ID NO: 473)
ISSSGSTI
HCDR3:
(SEQ ID NO: 474)
GREGYSGTYSYYGMDV
LCVR (V_{L}) Nucleotide Sequence
(SEQ ID NO: 475)
GATATTGTGATGACTCAGTCTCCACTCTCCCTGCCCGTCACCCCTGGAGAGCCGGCCTCCATCTCCTGCAGGTCTAG
TCAGAGCCTCCTGCATAGTAATGGATACAACTATTTGGATTGGTACCTGCAGAAGCCAGGGCAGTCTCCACAGTTCC
TGATCTATTTGGGTTCTAATCGGGCCTCCGGGGTCCCTGACAGGTTCAGTGGCAGTGGATCAGGCACAGATTTTACA
CTGAAAATCAACAGAGTGGAGGCTGAGGATGTTGGGGTTTATTACTGCATGCAAGCTCTACAAACTCCGTACACTTT
TGGCCAGGGGACCAAGCTGGAGATCAAA
LCVR (V_{L}) Amino Acid Sequence
(SEQ ID NO: 476)
DIVMTQSPLSLPVTPGEPASISCRSSQSLLHSNGYNYLDWYLQKPGQSPQFLIYLGSNRASGVPDRFSGSGSGTDFT
LKINRVEAEDVGVYYCMQALQTPYTFGQGTKLEIK
or
(SEQ ID NO: 632)
DIQLTQSPLSLPVTPGEPASISCRSSQSLLHSNGYNYLDWYLQKPGQSPQFLIYLGSNRASGVPDRFSGSGSGTDFT
LKINRVEAEDVGVYYCMQALQTPYTFGQGTKVEIK
LCDR1:
(SEQ ID NO: 477)
QSLLHSNGYNY
LCDR2:
(SEQ ID NO: 478)
LGS
LCDR3:
(SEQ ID NO: 479)
MQALQTPYT
69263
HCVR (V_{H}) Nucleotide Sequence
(SEQ ID NO: 480)
GAAGTGCAGCTGGTGGAGTCTGGGGGAGGGTTGGTACAGCCTGGCAGGTCCCTGAGACTCTCCTGTGCAGTCTCTGG
ATTCACCTTTGATGATTATGCCATGCACTGGGTCCGGCAAGCTCCAGGGAAGGGCCTGGAGTGGGTCTCAGGTATTA
GTTGGAATAGTGGTACCAGAGGATATGCGGACTCTGTGAAGGGCCGATTCACCATCTCCAGAGACAACGCCAAGAAC
TCCCTGTATCTGCAAATGAACAGTCTGAGAGGTGAGGACACGGCCTTGTATTACTGTGTAAAAGATATTACGATATC
CCCCAACTACTACGGTATGGACGTCTGGGGCCAAGGGACCACGGTCACCGTCTCCTCA
HCVR (V_{H}) Amino Acid Sequence
(SEQ ID NO: 481)
EVQLVESGGGLVQPGRSLRLSCAVSGFTFDDYAMHWVRQAPGKGLEWVSGISWNSGTRGYADSVKGRFTISRDNAKN
SLYLQMNSLRGEDTALYYCVKDITISPNYYGMDVWGQGTTVTVSS
HCDR1:
(SEQ ID NO: 482)
GFTFDDYA
HCDR2:
(SEQ ID NO: 483)
ISWNSGTR
HCDR3:
(SEQ ID NO: 484)
VKDITISPNYYGMDV
LCVR (V_{L}) Nucleotide Sequence
(SEQ ID NO: 485)
GACATCCAGATGACCCAGTCTCCATCCTCCCTGTCTGCATCTGTAGGAGACAGAGTCACCATCACTTGCCGGGCGAG
TCAGGACATTAGCCATTATTCAGCCTGGTATCAGCAGAAACCAGGGAAACTTCCTAACCTCCTGATCTATGCTGCAT
CCACTTTGCAATCAGGGGTCCCATCTCGGTTCAGTGGCAGTGGATCTGGGACAGATTTCTCTCTCACCACCAGCAGC
CTGCAGCCTGAAGATGTTGCAACTTATTACTGTCAAAAGTATAACAGTGTCCCTCTCACTTTCGGCGGAGGGACCAA
GGTGGAGATCAAA
LCVR (V_{L}) Amino Acid Sequence
(SEQ ID NO: 486)
DIQMTQSPSSLSASVGDRVTITCRASQDISHYSAWYQQKPGKLPNLLIYAASTLQSGVPSRFSGSGSGTDFSLTTSS
LQPEDVATYYCQKYNSVPLTFGGGTKVEIK
or
(SEQ ID NO: 703)
DIQLTQSPSSLSASVGDRVTITCRASQDISHYSAWYQQKPGKLPNLLIYAASTLQSGVPSRFSGSGSGTDFSLTTSS
LQPEDVATYYCQKYNSVPLTFGGRTKVEIK
LCDR1:
(SEQ ID NO: 487)
QDISHY
LCDR2:
(SEQ ID NO: 488)
AAS
LCDR3:
(SEQ ID NO: 489)
QKYNSVPLT

TABLE 3
Anti-hTfR scFv Molecules in Fusion Proteins.

| Antibody | SEQ | |
|---|---|---|
| clone | ID NO | Amino acid sequence (Vk-3xG4S(SEQ ID NO: 616)-Vh) |
| 12795B | 492 | DIQMTQSPSSLSASVGDRVTITCRASQGIRDHFGWYQQKPGKAPKRLIYAASSLHSGVPSRFSGSGS |
| | | GTEFTLTISSLQPEDFATYYCLQYDTYPLTFGGGTKVEIKGGGGSGGGGSGGGGSEVQLVESGGGLV |
| | | QPGGSLRLSCATSGFTFTSYDMKWVRQAPGLGLEWVSAISGSGGNTYYADSVKGRFTISRDNSRNTL |
| | | YLQMNSLRAEDTAVYYCTRSHDFGAFDYFDYWGQGTLVTVSS |
| 12798B | 493 | EIVMTQSPATLSVSPGERATLSCRASQTVSSNLAWYQQKPGQAPRLLIYGSSSRATGIPARFSGSGS |
| | | GTEFTLTISSLQSEDFAVYYCQQYNNWPPYTFGQGTKLEIKGGGGSGGGGSGGGGSEVQLVESGGDL |
| | | VQPGRSLRLSCAASGFTFDDYAMHWVRQAPGKGLEWVSGISWNSATRVYADSVKGRFTISRDNAKNF |
| | | LYLQMNSLRSEDTALYHCAKDMDISLGYYGLDVWGQGTTVTVSS |
| 12799B | 494 | DIQMTQSPSSVSASVGDRVTITCRASQGIASWLAWYQQKPGKAPELLIYAASSLQGGVPSRFSGSGS |
| | | GTDFTLTISSLQPEDFAIYYCQQANYFPWTFGQGTKVEIKGGGGSGGGGSGGGGSQITLKESGPTLV |
| | | KPTQTLTLTCTFSGFSLSTSGVGVVWIRQPPGKALEWLALIYWNDHKRYSPSLGSRLTITKDTSKNQ |
| | | VVLTMTNMDPVDTATYYCAHYSGSYSYYYYGLDVWGQGTTVTVSS |
| 12801B | 495 | DIQMTQSPSSLSASVGDRVTITCRASQGIRTDLGWYQQKPGKAPKRLIYAASSLQSGVPSRFSGSGS |
| | | GTEFTLTISSLRPEDFATFYCLQYNSYPLTFGGGTKVEIKGGGGSGGGGSGGGGSEVQLLESGGALV |
| | | QPGGSLRLSCAASGFTFTSYAMHWVRQAPGKGLEWVSSIRGSGGGTYSADSVKGRFTISRDNSRDTL |
| | | YLQMNSVRAEDTAVYYCARSHDYGAFDFFDYWGQGTLVTVSS |
| 12802B | 496 | EIVMTQSPATLSVSPGERATLSCRASQSVSINLAWYQQKPGQAPRLLIFVASTRATGIPARFSGSGS |
| | | GTEFTLTISSLQSEDFATYYCQQYDIWPYTFGQGTKLEIKGGGGSGGGGSGGGGSQVQLVESGGGLV |
| | | KPGGSLRLSCAASGFTFSDYFMSWIRQAPGKGLEWVSYISSTGSTINYADSVKGRFTISRDNVKNSL |
| | | YLQMTSLRVEDTAVYYCTRDNWNYEYWGQGTLVTVSS |
| 12808B | 497 | DIQMTQSPSSLSASVGDRVTINCRASQGIRNDLGWYQQKPGKAPKRLIYAASSLQSGVPLRFSGSGS |
| | | GTEFTLTINNLQPEDFATYYCLSHNSYPWTFGQGTKVEIKGGGGSGGGGSGGGGSQLQLQESGPGLV |
| | | KPSETLSLTCTVSGESISSNTYYWGWIRQPPGKGLEWIGSIDYSGTTNYNPSLKSRVTISVDTSRNH |
| | | FSLRLRSVTAADTAVYYCAREWGNYGYYYGMDVWGQGTTVTVSS |
| 12812B | 498 | DIQMTQSPPSVSASVGDRVTITCRASQGISSWLAWYQQKPGKAPKLLIYAASSLQSGVPSRFSGSGS |
| | | GTDFTLTISSLQPEDFATYYCQQANSFPRTFGQGTKVEIKGGGGSGGGGSGGGGSQVQLVQSGAEVK |
| | | KPGSSVRVSCKASRGTFSSYAISWVRQAPGQGLEWMGGIIPIFGTANYAQKFLARVTITADESTSTA |
| | | YMELSSLRSEDTAVYYCAREKGWNYFDYWGQGTLVTVSS |
| 12816B | 499 | DIVMTQSPLSLPVTPGEPASISCRSSQSLLHGNGYNYLTWYLQKPGQSPQLLIYLGSNRASGVPDRF |
| | | SGSGSGTDFTLKISRVEAEDVGVYYCMQALQTPYTFGQGTKLEIKGGGGSGGGGSGGGGSQVQLVES |
| | | GGGLVKPGGSLRLSCAASGFTFSDYYMNWIRQAPGKGLEWVSYISSSGTTIYYADSVKGRFTISRDN |
| | | AKKSLYLEMNSLRAEDTAVYYCAREGYGNDYYYYGIDVWGQGTTVTVSS |
| 12833B | 500 | DIQMTQSPSSLSASVGDRVTITCRASQSISSYLNWYQQKPGKAPKLLIYAASSLQSGVPSRFSGSGS |
| | | GTDFTLTISSLQPEDFATYYCQQSYSTPPITFGQGTRLEIKGGGGSGGGGSGGGGSQVQLVESGGGV |
| | | VQPGRSLRLSCAASGFTFSSFGMHWVRQAPGKGLEWVIFISYDGSDKYYADSVKGRFAISRDSSKNT |
| | | LYLQMNSLRAEDTAVYYCAKFNGILTDSYGMDVWGQGTTVTVSS |
| 12834B | 501 | DIQMTQSPSSLSASVGDRVTITCRASQSISSYLNWYQQKPGKAPKLLIYAASSLQSGVPSRFSGSGS |
| | | GTDFTLTISSLQPEDFATYYCQQSYSTPPITFGQGTRLEIKGGGGSGGGGSGGGGSQVQLVQSGAEV |
| | | KKPGASVKVSCKASGYTFTSYGISWVRQAPGQGLEWMGWISVYHGNTNYAQKFQGRVTMTTDTSTST |
| | | AYMELRSLRSDDTAVYYCAREGYYDFWSGYYPFDYWGQGTLVTVSS |
| 12835B | 502 | DIQMTQSPSSLSASVGDRVTITCRASQSISSYLNWYQQKPGKAPKLLIYAASSLQSGVPSRESGSGS |
| | | GTDFTLTISSLQPEDFATYYCQQSYSTPPITFGQGTRLEIKGGGGSGGGGSGGGGSEVQLVESGGGL |
| | | IQPGGSLRLSCEASGFTFRNYEMNWVRQAPGKGLEWVSYISSSGNMKDYAESVKGRFTISRDNVKNS |
| | | LQLQMNSLRVEDTAVYYCARDEFPYGMDVWGQGTTVTVSS |
| 12839B | 503 | DIQMTQSPSSLSASVGDRVTITCRASQSISSYLNWYQQKPGKAPKLLIYAASSLQSGVPSRFSGSGS |
| | | GTDFTLTISSLQPEDFATYYCQQSYSTPPITFGQGTRLEIKGGGGSGGGGSGGGGSQVQLVESGGGV |
| | | VQPGRSLRLSCAASGFPFSNYVMYWVRQAPGKGLEWVALIFFDGKKNYHADSVKGRFTITRDNSKNM |
| | | LYLQMNSLRPEDAAVYYCAKIHCPNGVCYKGYYGMDVWGQGTTVTVSS |
| 12841B | 504 | DIQMTQSPSSLSASVGDRVTITCRASQSISSYLNWYQQKPGKAPKLLIYAASSLQSGVPSRFSGSGS |
| | | GTDFTLTISSLQPEDFATYYCQQSYSTPPITFGQGTRLEIKGGGGSGGGGSGGGGSEVQLVESGGGL |
| | | VQPGGSLRLSCAASGFTFSNYWMNWVRQAPGKGLEWVANIKEDGGKKLYVDSVKGRFTISRDNAKNS |
| | | LFLQMNSLRAEDTAVYYCAREDTTLVVDYYYYGMDVWGQGTTVTVSS |
| 12843B | 505 | DIQMTQSPSSLSASVGDRVTITCRASQSISSYLNWYQQKPGKAPKLLIYAASSLQSGVPSRFSGSGS |
| | | GTDFTLTISSLQPEDFATYYCQQSYSTPPITFGQGTRLEIKGGGGSGGGGSGGGGSEVQLVESGGGL |
| | | VQPGGSLRLSCAASGFTFNIFEMNWVRQAPGKGLEWISYISSRGTTTYYADSVRGRFTISRDNAKNS |
| | | LYLQMNSLRAEDTAVYYCARDYEATIPFDFWGQGTLVTVSS |
| 12844B | 506 | DIQMTQSPSSLSASVGDRVTITCRASQSISSYLNWYQQKPGKAPKLLIYAASSLQSGVPSRFSGSGS |
| | | GTDFTLTISSLQPEDFATYYCQQSYSTPPITFGQGTRLEIKGGGGSGGGGSGGGGSEVQLVESGGSV |
| | | VRPGGSLRLSCEASGFTFDDYGMSWVRQDPGKGLEWVSGINWNGDRTNYADSVKGRFIISRDNAKNS |
| | | VYLQMNSLRAEDSALYHCARDQGLGVAATLDYWGQGTLVTVSS |
| 12845B | 507 | DIQMTQSPSSLSASVGDRVTITCRASQSISSYLNWYQQKPGKAPKLLIYAASSLQSGVPSRFSGSGS |
| | | GTDFTLTISSLQPEDFATYYCQQSYSTPPITFGQGTRLEIKGGGGSGGGGSGGGGSEVQLVESGGGL |
| | | VQPGGSLRLSCAASGFTVSNYEMNWVRQAPGKGLEWVSYISSSTSNIYYADSVKGRFTISRDNAENS |
| | | LYLQMNSLRVEDTAVYYCVRDGIVVVPVGRGYYYYGLDVWGQGTTVTVSS |
| 12847B | 508 | DIQMTQSPSSLSASVGDRVTITCRASQSISSYLNWYQQKPGKAPKLLIYAASSLQSGVPSRFSGSGS |
| | | GTDFTLTISSLQPEDFATYYCQQSYSTPPITFGQGTRLEIKGGGGSGGGGSGGGGSEVQLVESGGGL |
| | | VQPGRSLRLSCAASGFTFDDYAMNWVRQAPGKGLEWVSGISWSSGSMDYADSVKGRFTISRDNAKNS |
| | | LYLQMNSLRTEDTALYYCAKAREVGDYYGMDVWGQGTTVTVSS |
| 12848B | 509 | EIVLTQSPGTLSLSPGERATLSCRASQSVSSSYLAWYQQKPGQAPRLLIYGASSRATGIPDRESGSG |
| | | SGTDFTLTISRLEPEDFAVYYCQQYGSSPWTFGQGTKVEIKGGGGSGGGGSGGGGSEVQLVESGGGL |
| | | VQPGRSLTLSCAASGFTFDNFGMHWVRQGPGKGLEWVSGLTWNSGVIGYADSVKGRFTISRDNAKNS |
| | | LYLQMNSLRPEDTALYYCAKDIRNYGPFDYWGQGTLVTVSS |
| 12850B | 510 | EIVLTQSPGTLSLSPGERATLSCRASQSVSSSYLAWYQQKPGQAPRLLIYGASSRATGIPDRESGSG |
| | | SGTDFTLTISRLEPEDFAVYYCQQYGSSPWTFGQGTKVEIKGGGGSGGGGSGGGGSQVQLVQSGAEV |
| | | KKPGSSVKVSCKASGGTFNTYAITWVRQAPGQGLEWMGGIIPISGIAEYAQKFQGRVTITTDDSSTT |
| | | AYMELNSLRSEDTAVYYCASWNYALYYFYGMDVWGRGTTVTVSS |
| 31863B | 511 | DIQMTQSPSSLSASIGDRVTITCRASQGISNYLAWYQQKPGKVPKLLIYAASTLQSGVPSRFSGSGS |
| | | GTDFTLTISSLQPEDVATYYCQNHNSVPLTFGGGTKVEIKGGGGSGGGGSGGGGSEVQLVESGGGLV |
| | | QPGGSLRLSCAASGFTFNSYAMTWVRQAPGKGLEWVSFIGGSTGNTYYAGSVKGRFTISSDNSKKTL |
| | | YLQMNSLRAEDTAVYYCAKGGAARRMEYFQHWGQGTLVTVSS |
| 31874B | 512 | DIQMTQSPSSLSASVGDRVTITCRASQGISNYLAWYQQKPGKVPNLLIYAASTLQSGVPSRFSGSGS |
| | | GTDFTLTISSLQPEDVATYYCQKYNSAPLTFGGGTKVEIKGGGGSGGGGSGGGGSEVQLVESGGGLV |
| | | QPGGSLRLSCAASGFAFSSYAMTWVRQAPGKGLEWVSVISGTGGSTYYADSVKGRFTISRDNSKNTL |
| | | YLQMNSLRAEDTAVYYCAKGGAARRMEYFQYWGQGTLVTVSS |
| 69261 | 513 | DIVMTQSPLSLPVTPGEPASISCRSSQSLLHSNGYNYLDWYLQKPGQSPQFLIYLGSNRASGVPDRF |
| | | SGSGSGTDFTLKINRVEAEDVGVYYCMQALQTPYTFGQGTKLEIKGGGGSGGGGSGGGGSQVQLVES |
| | | GGGLVKPGGSLRLSCAASGFTFSVYYMNWIRQAPGKGLEWVSYISSSGSTIYYADSVKGRFTISRDN |
| | | AKNSLYLQMNSLRAEDTAVYYCGREGYSGTYSYYGMDVWGQGTTVTVSS |
| 69263 | 514 | DIQMTQSPSSLSASVGDRVTITCRASQDISHYSAWYQQKPGKLPNLLIYAASTLQSGVPSRFSGSGS |
| | | GTDFSLTTSSLQPEDVATYYCQKYNSVPLTFGGGTKVEIKGGGGSGGGGSGGGGSEVQLVESGGGLV |
| | | QPGRSLRLSCAVSGFTFDDYAMHWVRQAPGKGLEWVSGISWNSGTRGYADSVKGRFTISRDNAKNSL |
| | | YLQMNSLRGEDTALYYCVKDITISPNYYGMDVWGQGTTVTVSS |
| 69305 | 515 | DIQMTQSPSSLSASVGDRVTITCRASQSIDRYLNWYRQKPGKAPKLLIYTTSSLQSGVPSRFSGSGS |
| | | GTDFTLTLSSLQPEDFATYYCQQSYSPPLTFGGGTKVEIKGGGGSGGGGSGGGGSQVQLVESGGGVV |
| | | QPGRSLRLSCAASGFTFSSYGMHWVRQAPGKGLEWVAVIWYDGSNKYYADSVKGRFTISRDISKNTL |
| | | YLQMNSLRAEDTAVYYCAGQLDLFFDYWGQGTLVTVSS |
| 69307 | 516 | DIQMTQSPSSVSASVGDRVTITCRASQGISSWLAWYQQKPGKAPKLLIYAASSLQSGVPSRFSGSGS |
| | | GTDFTLTISSLQPEDFATYYCQKADSLPYAFGQGTKLEIKGGGGSGGGGSGGGGSEVQLVESGGGLV |
| | | QPGGSLRLSCTASGFTFSNYWMTWVRQAPGKGLEWVANIKEDGSEKEYVDSVKGRFTISRDNAKNSL |
| | | YLQMNSLRGEDTAVYYCARDGEQLVDYYYYYVMDVWGQGTTVTVSS |
| 69323 | 517 | DIQMTQSPSSLSASVGDRVTITCRASQSISSYLNWYQQKPGKAPKVLIYAASSLQSGVPSRESGSGS |
| | | GTDFTLTISSLQPEDFATYYCQQSYSIPLTFGGGTKVEIKGGGGSGGGGSGGGGSEVQLVESGGGLV |
| | | QPGRSLRLSCAASGFTFDDYAMHWVRQAPGKGLEWVSGISWNSGYIGYADSVKGRFTISRDNAENSL |
| | | HLQMNSLRAEDTALYYCARGGSTLVRGVKGGYYGMDVWGQGTTVTVSS |
| 69326 | 518 | EIVMTQSPATLSVSPGERATLSCRASQSVSSNFAWYQQKPGQAPRLLIYSASSRATGIPVRFSGSGS |
| | | GTEFTLTISSLQSEDFAVYYCQQYNIWPRTFGQGTKVEIKGGGGSGGGGSGGGGSEVQLVESGGGLV |
| | | QPGGSLRLSCAVSGFIFSSYEMNWVRQAPGKGLEWVSYISSSGSTIFYADSVKGRFTISRDNAKNSL |
| | | YLQMNSLRAEDTAVYYCVSGVVLFDVWGQGTMVTVSS |
| 69329 | 519 | DIQMTQSPSSVSASVGDRVTITCRASQGISSWLAWYQQKPGKAPKLLIYAASSLQSGVPSRFSGSGS |
| | | GTDFTLTISSLQPEDFATYYCQKANSFPYTFGQGTKLEIKGGGGSGGGGSGGGGSEVQLVESGGGLV |
| | | QPGGSLRLSCAASGFTFSNYWMTWVRQAPGKGLEWVANIKEDGSEKDYVDSVKGRFTISRDNAKNSL |
| | | YLQMNSLRGEDTAVYYCARDGEQLVDYYYYYVMDVWGQGTTVTVSS |
| 69331 | 520 | DIQLTQSPSSLSASVGDRVTITCWASQGISSYLAWYQQKPGKAPKLLIYAASTLQSGVPSRFSGSGS |
| | | GTEFTLTISSLQPEDFATYYCQQLNSYPLTFGGGTKVEIKGGGGSGGGGSGGGGSQVQLVESGGGVV |
| | | QPGRSLRLSCIASGFTFSVYGIHWVRQAPGKGLEWMAVISHDGNIKHYADSVKGRFTISRDNSKNTL |
| | | YLQINSLRTEDTAVYYCAKDTWNSLDTFDIWGQGTMVTVSS |
| 69332 | 521 | AIQMTQSPSSLSASVGDRVTITCRASQGIRNDLGWYQQKPGKAPKLLIYAASTLQSGVPSRFSGSGS |
| | | GTDFTLTISSLQPEDFATYYCLQDYNYPFTFGPGTKVDIKGGGGSGGGGSGGGGSQVTLRESGPALV |
| | | KPSQTLTLTCTFSGFSLNTYGMFVSWIRQPPGKALEWLAHIHWDDDKYYSTSLKTRLTISKDTSKNQ |
| | | VVLTMTNMDPVDTATYYCARGHNNLNYIIHWGQGTLVTVSS |
| 69340 | 522 | EIVLTQSPATLSLSPGERATLSCRASQSVSSYLAWYQQKPGQAPRLLIHDVSNRATGIPARFSGSGS |
| | | GTDFTLTISSLEPEDFVVYYCQQRSDWPITFGQGTRLEIKGGGGSGGGGSGGGGSEVQLVESGGGLV |
| | | QPGRSLRLSCAASGFTFDDKAMHWVRQVPGKGLEWISGISWNSGTIGYADSVKGRFIISRDNAKNSL |
| | | YLQMNSLRAEDTALYYCAKDGDTSGWYWYGLDVWGQGTTVTVSS |
| 69348 | 523 | DIQMTQSPSSLSASVGDRVTITCRASQSIRNVLGWFQQKPGKAPQRLIYAASSLQSGVPSRFSGSGS |
| | | GTEFTLTISSLQPEDFATYYCLQHNFYPLTFGGGTKVEIKGGGGSGGGGSGGGGSQVQLVESGGGVV |
| | | QPGRSLRLSCAASGFTFTTYGMHWVRQAPGKGLEWVAVIWYDGSNKYYGDSVKGRFTISRDNSKNTL |
| | | YLQMNSLRVDDTAVYYCTRTHGYTRSSDGFDYWGQGTLVTVSS |

Heavy and Light Chains of anti-hTfR Fabs in anti-hTfR:ASM Fusion Proteins:

(1) 31874B
Fab Light Chain
DIQMTQSPSSLSASVGDRVTITCRASQGISNYLAWYQQKPGKVPNLLIYAASTLQSGVPSRFSGSGSGTDFTLTISS
LQPEDVATYYCQKYNSAPLTFGGGTKVEIKRTVAAPSVFIFPPSDEQLKSGTASVVCLLNNFYPREAKVQWKVDNAL
QSGNSQESVTEQDSKDSTYSLSSTLTLSKADYEKHKVYACEVTHQGLSSPVTKSFNRGEC (SEQ ID NO: 540)
Fab Heavy Chain
EVQLVESGGGLVQPGGSLRLSCAASGFAFSSYAMTWVRQAPGKGLEWVSVISGTGGSTYYADSVKGRFTISRDNSKN
TLYLQMNSLRAEDTAVYYCAKGGAARRMEYFQYWGQGTLVTVSSASTKGPSVFPLAPSSKSTSGGTAALGCLVKDYF
PEPVTVSWNSGALTSGVHTFPAVLQSSGLYSLSSVVTVPSSSLGTQTYICNVNHKPSNTKVDKKVEPKSCDKTH
(SEQ ID NO: 541)
(2) 31863B
Fab Light Chain
DIQMTQSPSSLSASIGDRVTITCRASQGISNYLAWYQQKPGKVPKLLIYAASTLQSGVPSRFSGSGSGTDFTLTISS
LQPEDVATYYCQNHNSVPLTFGGGTKVEIKRTVAAPSVFIFPPSDEQLKSGTASVVCLLNNFYPREAKVQWKVDNAL
QSGNSQESVTEQDSKDSTYSLSSTLTLSKADYEKHKVYACEVTHQGLSSPVTKSFNRGEC (SEQ ID NO: 542)
Fab Heavy Chain
EVQLVESGGGLVQPGGSLRLSCAASGFTFNSYAMTWVRQAPGKGLEWVSFIGGSTGNTYYAGSVKGRFTISSDNSKK
TLYLQMNSLRAEDTAVYYCAKGGAARRMEYFQHWGQGTLVTVSSASTKGPSVFPLAPSSKSTSGGTAALGCLVKDYF
PEPVTVSWNSGALTSGVHTFPAVLQSSGLYSLSSVVTVPSSSLGTQTYICNVNHKPSNTKVDKKVEPKSCDKTH
(SEQ ID NO: 543)
(3) 69348
Fab Light Chain
DIQMTQSPSSLSASVGDRVTITCRASQSIRNVLGWFQQKPGKAPQRLIYAASSLQSGVPSRFSGSGSGTEFTLTISS
LQPEDFATYYCLQHNFYPLTFGGGTKVEIKRTVAAPSVFIFPPSDEQLKSGTASVVCLLNNFYPREAKVQWKVDNAL
QSGNSQESVTEQDSKDSTYSLSSTLTLSKADYEKHKVYACEVTHQGLSSPVTKSFNRGEC (SEQ ID NO: 544)
Fab Heavy Chain
QVQLVESGGGVVQPGRSLRLSCAASGFTFTTYGMHWVRQAPGKGLEWVAVIWYDGSNKYYGDSVKGRFTISRDNSKN
TLYLQMNSLRVDDTAVYYCTRTHGYTRSSDGFDYWGQGTLVTVSSASTKGPSVFPLAPSSKSTSGGTAALGCLVKDY
FPEPVTVSWNSGALTSGVHTFPAVLQSSGLYSLSSVVTVPSSSLGTQTYICNVNHKPSNTKVDKKVEPKSCDKTH
(SEQ ID NO: 545)
(4) 69340
Fab Light Chain
EIVLTQSPATLSLSPGERATLSCRASQSVSSYLAWYQQKPGQAPRLLIHDVSNRATGIPARFSGSGSGTDFTLTISS
LEPEDFVVYYCQQRSDWPITFGQGTRLEIKRTVAAPSVFIFPPSDEQLKSGTASVVCLLNNFYPREAKVQWKVDNAL
QSGNSQESVTEQDSKDSTYSLSSTLTLSKADYEKHKVYACEVTHQGLSSPVTKSFNRGEC (SEQ ID NO: 546)
Fab Heavy Chain
EVQLVESGGGLVQPGRSLRLSCAASGFTFDDKAMHWVRQVPGKGLEWISGISWNSGTIGYADSVKGRFIISRDNAKN
SLYLQMNSLRAEDTALYYCAKDGDTSGWYWYGLDVWGQGTTVTVSSASTKGPSVFPLAPSSKSTSGGTAALGCLVKD
YFPEPVTVSWNSGALTSGVHTFPAVLQSSGLYSLSSVVTVPSSSLGTQTYICNVNHKPSNTKVDKKVEPKSCDKTH
(SEQ ID NO: 547)
(5) 69331
Fab Light Chain
DIQLTQSPSSLSASVGDRVTITCWASQGISSYLAWYQQKPGKAPKLLIYAASTLQSGVPSRFSGSGSGTEFTLTISS
LQPEDFATYYCQQLNSYPLTFGGGTKVEIKRTVAAPSVFIFPPSDEQLKSGTASVVCLLNNFYPREAKVQWKVDNAL
QSGNSQESVTEQDSKDSTYSLSSTLTLSKADYEKHKVYACEVTHQGLSSPVTKSFNRGEC (SEQ ID NO: 548)
Fab Heavy Chain
QVQLVESGGGVVQPGRSLRLSCIASGFTFSVYGIHWVRQAPGKGLEWMAVISHDGNIKHYADSVKGRFTISRDNSKN
TLYLQINSLRTEDTAVYYCAKDTWNSLDTFDIWGQGTMVTVSSASTKGPSVFPLAPSSKSTSGGTAALGCLVKDYFP
EPVTVSWNSGALTSGVHTFPAVLQSSGLYSLSSVVTVPSSSLGTQTYICNVNHKPSNTKVDKKVEPKSCDKTH
(SEQ ID NO: 549)
(6) 69332
Fab Light Chain
AIQMTQSPSSLSASVGDRVTITCRASQGIRNDLGWYQQKPGKAPKLLIYAASTLQSGVPSRFSGSGSGTDFTLTISS
LQPEDFATYYCLQDYNYPFTFGPGTKVDIKRTVAAPSVFIFPPSDEQLKSGTASVVCLLNNFYPREAKVQWKVDNAL
QSGNSQESVTEQDSKDSTYSLSSTLTLSKADYEKHKVYACEVTHQGLSSPVTKSFNRGEC (SEQ ID NO: 550)
Fab Heavy Chain
QVTLRESGPALVKPSQTLTLTCTFSGFSLNTYGMFVSWIRQPPGKALEWLAHIHWDDDKYYSTSLKTRLTISKDTSK
NQVVLTMTNMDPVDTATYYCARGHNNLNYIIHWGQGTLVTVSSASTKGPSVFPLAPSSKSTSGGTAALGCLVKDYFP
EPVTVSWNSGALTSGVHTFPAVLQSSGLYSLSSVVTVPSSSLGTQTYICNVNHKPSNTKVDKKVEPKSCDKTH
(SEQ ID NO: 551)
(7) 69326
Fab Light Chain
EIVMTQSPATLSVSPGERATLSCRASQSVSSNFAWYQQKPGQAPRLLIYSASSRATGIPVRFSGSGSGTEFTLTISS
LQSEDFAVYYCQQYNIWPRTFGQGTKVEIKRTVAAPSVFIFPPSDEQLKSGTASVVCLLNNFYPREAKVQWKVDNAL
QSGNSQESVTEQDSKDSTYSLSSTLTLSKADYEKHKVYACEVTHQGLSSPVTKSFNRGEC (SEQ ID NO: 552)
Fab Heavy Chain
EVQLVESGGGLVQPGGSLRLSCAVSGFIFSSYEMNWVRQAPGKGLEWVSYISSSGSTIFYADSVKGRFTISRDNAKN
SLYLQMNSLRAEDTAVYYCVSGVVLFDVWGQGTMVTVSSASTKGPSVFPLAPSSKSTSGGTAALGCLVKDYFPEPVT
VSWNSGALTSGVHTFPAVLQSSGLYSLSSVVTVPSSSLGTQTYICNVNHKPSNTKVDKKVEPKSCDKTH
(SEQ ID NO: 553)
(8) 69329
Fab Light Chain
DIQMTQSPSSVSASVGDRVTITCRASQGISSWLAWYQQKPGKAPKLLIYAASSLQSGVPSRFSGSGSGTDFTLTISS
LQPEDFATYYCQKANSFPYTFGQGTKLEIKRTVAAPSVFIFPPSDEQLKSGTASVVCLLNNFYPREAKVQWKVDNAL
QSGNSQESVTEQDSKDSTYSLSSTLTLSKADYEKHKVYACEVTHQGLSSPVTKSFNRGEC (SEQ ID NO: 554)
Fab Heavy Chain
EVQLVESGGGLVQPGGSLRLSCAASGFTFSNYWMTWVRQAPGKGLEWVANIKEDGSEKDYVDSVKGRFTISRDNAKN
SLYLQMNSLRGEDTAVYYCARDGEQLVDYYYYYVMDVWGQGTTVTVSSASTKGPSVFPLAPSSKSTSGGTAALGCLV
KDYFPEPVTVSWNSGALTSGVHTFPAVLQSSGLYSLSSVVTVPSSSLGTQTYICNVNHKPSNTKVDKKVEPKSCDKT
H (SEQ ID NO: 555)
(9) 69323
Fab Light Chain
DIQMTQSPSSLSASVGDRVTITCRASQSISSYLNWYQQKPGKAPKVLIYAASSLQSGVPSRFSGSGSGTDFTLTISS
LQPEDFATYYCQQSYSIPLTFGGGTKVEIKRTVAAPSVFIFPPSDEQLKSGTASVVCLLNNFYPREAKVQWKVDNAL
QSGNSQESVTEQDSKDSTYSLSSTLTLSKADYEKHKVYACEVTHQGLSSPVTKSFNRGEC (SEQ ID NO: 556)
Fab Heavy Chain
EVQLVESGGGLVQPGRSLRLSCAASGFTFDDYAMHWVRQAPGKGLEWVSGISWNSGYIGYADSVKGRFTISRDNAEN
SLHLQMNSLRAEDTALYYCARGGSTLVRGVKGGYYGMDVWGQGTTVTVSSASTKGPSVFPLAPSSKSTSGGTAALGC
LVKDYFPEPVTVSWNSGALTSGVHTFPAVLQSSGLYSLSSVVTVPSSSLGTQTYICNVNHKPSNTKVDKKVEPKSCD
KTH (SEQ ID NO: 557)
(10) 69305
Fab Light Chain
DIQMTQSPSSLSASVGDRVTITCRASQSIDRYLNWYRQKPGKAPKLLIYTTSSLQSGVPSRFSGSGSGTDFTLTLSS
LQPEDFATYYCQQSYSPPLTFGGGTKVEIKRTVAAPSVFIFPPSDEQLKSGTASVVCLLNNFYPREAKVQWKVDNAL
QSGNSQESVTEQDSKDSTYSLSSTLTLSKADYEKHKVYACEVTHQGLSSPVTKSFNRGEC (SEQ ID NO: 558)
Fab Heavy Chain
QVQLVESGGGVVQPGRSLRLSCAASGFTFSSYGMHWVRQAPGKGLEWVAVIWYDGSNKYYADSVKGRFTISRDISKN
TLYLQMNSLRAEDTAVYYCAGQLDLFFDYWGQGTLVTVSSASTKGPSVFPLAPSSKSTSGGTAALGCLVKDYFPEPV
TVSWNSGALTSGVHTFPAVLQSSGLYSLSSVVTVPSSSLGTQTYICNVNHKPSNTKVDKKVEPKSCDKTH
(SEQ ID NO: 559)
(11) 69307
Fab Light Chain
DIQMTQSPSSVSASVGDRVTITCRASQGISSWLAWYQQKPGKAPKLLIYAASSLQSGVPSRFSGSGSGTDFTLTISS
LQPEDFATYYCQKADSLPYAFGQGTKLEIKRTVAAPSVFIFPPSDEQLKSGTASVVCLLNNFYPREAKVQWKVDNAL
QSGNSQESVTEQDSKDSTYSLSSTLTLSKADYEKHKVYACEVTHQGLSSPVTKSFNRGEC (SEQ ID NO: 560)
Fab Heavy Chain
EVQLVESGGGLVQPGGSLRLSCTASGFTFSNYWMTWVRQAPGKGLEWVANIKEDGSEKEYVDSVKGRFTISRDNAKN
SLYLQMNSLRGEDTAVYYCARDGEQLVDYYYYYVMDVWGQGTTVTVSSASTKGPSVFPLAPSSKSTSGGTAALGCLV
KDYFPEPVTVSWNSGALTSGVHTFPAVLQSSGLYSLSSVVTVPSSSLGTQTYICNVNHKPSNTKVDKKVEPKSCDKT
H (SEQ ID NO: 561)
(12) 12795B
Fab Light Chain
DIQMTQSPSSLSASVGDRVTITCRASQGIRDHFGWYQQKPGKAPKRLIYAASSLHSGVPSRFSGSGSGTEFTLTISS
LQPEDFATYYCLQYDTYPLTFGGGTKVEIKRTVAAPSVFIFPPSDEQLKSGTASVVCLLNNFYPREAKVQWKVDNAL
QSGNSQESVTEQDSKDSTYSLSSTLTLSKADYEKHKVYACEVTHQGLSSPVTKSFNRGEC (SEQ ID NO: 562)
Fab Heavy Chain
EVQLVESGGGLVQPGGSLRLSCATSGFTFTSYDMKWVRQAPGLGLEWVSAISGSGGNTYYADSVKGRFTISRDNSRN
TLYLQMNSLRAEDTAVYYCTRSHDFGAFDYFDYWGQGTLVTVSSASTKGPSVFPLAPSSKSTSGGTAALGCLVKDYF
PEPVTVSWNSGALTSGVHTFPAVLQSSGLYSLSSVVTVPSSSLGTQTYICNVNHKPSNTKVDKKVEPKSCDKTH
(SEQ ID NO: 563)
(13) 12798B (REGN17078)
Fab Light Chain
EIVMTQSPATLSVSPGERATLSCRASQTVSSNLAWYQQKPGQAPRLLIYGSSSRATGIPARFSGSGSGTEFTLTISS
LQSEDFAVYYCQQYNNWPPYTFGQGTKLEIKRTVAAPSVFIFPPSDEQLKSGTASVVCLLNNFYPREAKVQWKVDNA
LQSGNSQESVTEQDSKDSTYSLSSTLTLSKADYEKHKVYACEVTHQGLSSPVTKSFNRGEC (SEQ ID NO: 564)
Fab Heavy Chain
EVQLVESGGDLVQPGRSLRLSCAASGFTEDDYAMHWVRQAPGKGLEWVSGISWNSATRVYADSVKGRFTISRDNAKN
FLYLQMNSLRSEDTALYHCAKDMDISLGYYGLDVWGQGTTVTVSSASTKGPSVFPLAPSSKSTSGGTAALGCLVKDY
FPEPVTVSWNSGALTSGVHTFPAVLQSSGLYSLSSVVTVPSSSLGTQTYICNVNHKPSNTKVDKKVEPKSCDKTH
(SEQ ID NO: 565);
or
EVQLVESGGDLVQPGRSLRLSCAASGFTFDDYAMHWVRQAPGKGLEWVSGISWNSATRVYADSVKGRFTISRDNAKN
FLYLQMNSLRSEDTALYHCAKDMDISLGYYGLDVWGQGTTVTVSSASTKGPSVFPLAPCSRSTSESTAALGCLVKDY
FPEPVTVSWNSGALTSGVHTFPAVLQSSGLYSLSSVVTVPSSSLGTKTYTCNVDHKPSNTKVDKRVESKYGPPLLQG
SG (SEQ ID NO: 604);
or
EVQLVESGGDLVQPGRSLRLSCAASGFTFDDYAMHWVRQAPGKGLEWVSGISWNSATRVYADSVKGRFTISRDNAKN
FLYLQMNSLRSEDTALYHCAKDMDISLGYYGLDVWGQGTTVTVSSASTKGPSVFPLAPCSRSTSESTAALGCLVKDY
FPEPVTVSWNSGALTSGVHTFPAVLQSSGLYSLSSVVTVPSSSLGTKTYTCNVDHKPSNTKVDKRVESKYGPP
(SEQ ID NO: 633)
(14) 12799B (REGN17079)
Fab Light Chain
DIQMTQSPSSVSASVGDRVTITCRASQGIASWLAWYQQKPGKAPELLIYAASSLQGGVPSRFSGSGSGTDFTLTISS
LQPEDFAIYYCQQANYFPWTFGQGTKVEIKRTVAAPSVFIFPPSDEQLKSGTASVVCLLNNFYPREAKVQWKVDNAL
QSGNSQESVTEQDSKDSTYSLSSTLTLSKADYEKHKVYACEVTHQGLSSPVTKSFNRGEC (SEQ ID NO: 566)
Fab Heavy Chain
QITLKESGPTLVKPTQTLTLTCTFSGFSLSTSGVGVVWIRQPPGKALEWLALIYWNDHKRYSPSLGSRLTITKDTSK
NQVVLTMTNMDPVDTATYYCAHYSGSYSYYYYGLDVWGQGTTVTVSSASTKGPSVFPLAPSSKSTSGGTAALGCLVK
DYFPEPVTVSWNSGALTSGVHTFPAVLQSSGLYSLSSVVTVPSSSLGTQTYICNVNHKPSNTKVDKKVEPKSCDKTH
(SEQ ID NO: 567);
or
QITLKESGPTLVKPTQTLTLTCTFSGFSLSTSGVGVVWIRQPPGKALEWLALIYWNDHKRYSPSLGSRLTITKDTSK
NQVVLTMTNMDPVDTATYYCAHYSGSYSYYYYGLDVWGQGTTVTVSSASTKGPSVFPLAPCSRSTSESTAALGCLVK
DYFPEPVTVSWNSGALTSGVHTFPAVLQSSGLYSLSSVVTVPSSSLGTKTYTCNVDHKPSNTKVDKRVESKYGPPLL
QGSG
(SEQ ID NO: 605);
or
QITLKESGPTLVKPTQTLTLTCTFSGFSLSTSGVGVVWIRQPPGKALEWLALIYWNDHKRYSPSLGSRLTITKDTSK
NQVVLTMTNMDPVDTATYYCAHYSGSYSYYYYGLDVWGQGTTVTVSSASTKGPSVFPLAPCSRSTSESTAALGCLVK
DYFPEPVTVSWNSGALTSGVHTFPAVLQSSGLYSLSSVVTVPSSSLGTKTYTCNVDHKPSNTKVDKRVESKYGPP
(SEQ ID NO: 634)
(15) 12801B
Fab Light Chain
DIQMTQSPSSLSASVGDRVTITCRASQGIRTDLGWYQQKPGKAPKRLIYAASSLQSGVPSRFSGSGSGTEFTLTISS
LRPEDFATFYCLQYNSYPLTFGGGTKVEIKRTVAAPSVFIFPPSDEQLKSGTASVVCLLNNFYPREAKVQWKVDNAL
QSGNSQESVTEQDSKDSTYSLSSTLTLSKADYEKHKVYACEVTHQGLSSPVTKSFNRGEC (SEQ ID NO: 568)
Fab Heavy Chain
EVQLLESGGALVQPGGSLRLSCAASGFTFTSYAMHWVRQAPGKGLEWVSSIRGSGGGTYSADSVKGRFTISRDNSRD
TLYLQMNSVRAEDTAVYYCARSHDYGAFDFFDYWGQGTLVTVSSASTKGPSVFPLAPSSKSTSGGTAALGCLVKDYF
PEPVTVSWNSGALTSGVHTFPAVLQSSGLYSLSSVVTVPSSSLGTQTYICNVNHKPSNTKVDKKVEPKSCDKTH
(SEQ ID NO: 569)
(16) 12802B
Fab Light Chain
EIVMTQSPATLSVSPGERATLSCRASQSVSINLAWYQQKPGQAPRLLIFVASTRATGIPARFSGSGSGTEFTLTISS
LQSEDFATYYCQQYDIWPYTFGQGTKLEIKRTVAAPSVFIFPPSDEQLKSGTASVVCLLNNFYPREAKVQWKVDNAL
QSGNSQESVTEQDSKDSTYSLSSTLTLSKADYEKHKVYACEVTHQGLSSPVTKSFNRGEC (SEQ ID NO: 570)
Fab Heavy Chain
QVQLVESGGGLVKPGGSLRLSCAASGFTFSDYFMSWIRQAPGKGLEWVSYISSTGSTINYADSVKGRFTISRDNVKN
SLYLQMTSLRVEDTAVYYCTRDNWNYEYWGQGTLVTVSSASTKGPSVFPLAPSSKSTSGGTAALGCLVKDYFPEPVT
VSWNSGALTSGVHTFPAVLQSSGLYSLSSVVTVPSSSLGTQTYICNVNHKPSNTKVDKKVEPKSCDKTH
(SEQ ID NO: 571)
(17) 12808B
Fab Light Chain
DIQMTQSPSSLSASVGDRVTINCRASQGIRNDLGWYQQKPGKAPKRLIYAASSLQSGVPLRFSGSGSGTEFTLTINN
LQPEDFATYYCLSHNSYPWTFGQGTKVEIKRTVAAPSVFIFPPSDEQLKSGTASVVCLLNNFYPREAKVQWKVDNAL
QSGNSQESVTEQDSKDSTYSLSSTLTLSKADYEKHKVYACEVTHQGLSSPVTKSFNRGEC (SEQ ID NO: 572)
Fab Heavy Chain
QLQLQESGPGLVKPSETLSLTCTVSGESISSNTYYWGWIRQPPGKGLEWIGSIDYSGTTNYNPSLKSRVTISVDTSR
NHFSLRLRSVTAADTAVYYCAREWGNYGYYYGMDVWGQGTTVTVSSASTKGPSVFPLAPSSKSTSGGTAALGCLVKD
YFPEPVTVSWNSGALTSGVHTFPAVLQSSGLYSLSSVVTVPSSSLGTQTYICNVNHKPSNTKVDKKVEPKSCDKTH
(SEQ ID NO: 573)
(18) 12812B
Fab Light Chain
DIQMTQSPPSVSASVGDRVTITCRASQGISSWLAWYQQKPGKAPKLLIYAASSLQSGVPSRFSGSGSGTDFTLTISS
LQPEDFATYYCQQANSFPRTFGQGTKVEIKRTVAAPSVFIFPPSDEQLKSGTASVVCLLNNFYPREAKVQWKVDNAL
QSGNSQESVTEQDSKDSTYSLSSTLTLSKADYEKHKVYACEVTHQGLSSPVTKSFNRGEC (SEQ ID NO: 574)
Fab Heavy Chain
QVQLVQSGAEVKKPGSSVRVSCKASRGTESSYAISWVRQAPGQGLEWMGGIIPIFGTANYAQKFLARVTITADESTS
TAYMELSSLRSEDTAVYYCAREKGWNYFDYWGQGTLVTVSSASTKGPSVFPLAPSSKSTSGGTAALGCLVKDYFPEP
VTVSWNSGALTSGVHTFPAVLQSSGLYSLSSVVTVPSSSLGTQTYICNVNHKPSNTKVDKKVEPKSCDKTH
(SEQ ID NO: 575)
(19) 12816B
Fab Light Chain
DIVMTQSPLSLPVTPGEPASISCRSSQSLLHGNGYNYLTWYLQKPGQSPQLLIYLGSNRASGVPDRFSGSGSGTDFT
LKISRVEAEDVGVYYCMQALQTPYTFGQGTKLEIKRTVAAPSVFIFPPSDEQLKSGTASVVCLLNNFYPREAKVQWK
VDNALQSGNSQESVTEQDSKDSTYSLSSTLTLSKADYEKHKVYACEVTHQGLSSPVTKSFNRGEC
(SEQ ID NO: 576)
Fab Heavy Chain
QVQLVESGGGLVKPGGSLRLSCAASGFTFSDYYMNWIRQAPGKGLEWVSYISSSGTTIYYADSVKGRFTISRDNAKK
SLYLEMNSLRAEDTAVYYCAREGYGNDYYYYGIDVWGQGTTVTVSSASTKGPSVFPLAPSSKSTSGGTAALGCLVKD
YFPEPVTVSWNSGALTSGVHTFPAVLQSSGLYSLSSVVTVPSSSLGTQTYICNVNHKPSNTKVDKKVEPKSCDKTH
(SEQ ID NO: 577)
(20) 12833B
Fab Light Chain
DIQMTQSPSSLSASVGDRVTITCRASQSISSYLNWYQQKPGKAPKLLIYAASSLQSGVPSRFSGSGSGTDFTLTISS
LQPEDFATYYCQQSYSTPPITFGQGTRLEIKRTVAAPSVFIFPPSDEQLKSGTASVVCLLNNFYPREAKVQWKVDNA
LQSGNSQESVTEQDSKDSTYSLSSTLTLSKADYEKHKVYACEVTHQGLSSPVTKSFNRGEC (SEQ ID NO: 578)
Fab Heavy Chain
QVQLVESGGGVVQPGRSLRLSCAASGFTFSSFGMHWVRQAPGKGLEWVIFISYDGSDKYYADSVKGRFAISRDSSKN
TLYLQMNSLRAEDTAVYYCAKFNGILTDSYGMDVWGQGTTVTVSSASTKGPSVFPLAPSSKSTSGGTAALGCLVKDY
FPEPVTVSWNSGALTSGVHTFPAVLQSSGLYSLSSVVTVPSSSLGTQTYICNVNHKPSNTKVDKKVEPKSCDKTH
(SEQ ID NO: 579)
(21) 12834B
Fab Light Chain
DIQMTQSPSSLSASVGDRVTITCRASQSISSYLNWYQQKPGKAPKLLIYAASSLQSGVPSRFSGSGSGTDFTLTISS
LQPEDFATYYCQQSYSTPPITFGQGTRLEIKRTVAAPSVFIFPPSDEQLKSGTASVVCLLNNFYPREAKVQWKVDNA
LQSGNSQESVTEQDSKDSTYSLSSTLTLSKADYEKHKVYACEVTHQGLSSPVTKSFNRGEC (SEQ ID NO: 580)
Fab Heavy Chain
QVQLVQSGAEVKKPGASVKVSCKASGYTFTSYGISWVRQAPGQGLEWMGWISVYHGNTNYAQKFQGRVTMTTDTSTS
TAYMELRSLRSDDTAVYYCAREGYYDFWSGYYPFDYWGQGTLVTVSSASTKGPSVFPLAPSSKSTSGGTAALGCLVK
DYFPEPVTVSWNSGALTSGVHTFPAVLQSSGLYSLSSVVTVPSSSLGTQTYICNVNHKPSNTKVDKKVEPKSCDKTH
(SEQ ID NO: 581)
(22) 12835B
Fab Light Chain
DIQMTQSPSSLSASVGDRVTITCRASQSISSYLNWYQQKPGKAPKLLIYAASSLQSGVPSRFSGSGSGTDFTLTISS
LQPEDFATYYCQQSYSTPPITFGQGTRLEIKRTVAAPSVFIFPPSDEQLKSGTASVVCLLNNFYPREAKVQWKVDNA
LQSGNSQESVTEQDSKDSTYSLSSTLTLSKADYEKHKVYACEVTHQGLSSPVTKSFNRGEC (SEQ ID NO: 582)
Fab Heavy Chain
EVQLVESGGGLIQPGGSLRLSCEASGFTFRNYEMNWVRQAPGKGLEWVSYISSSGNMKDYAESVKGRFTISRDNVKN
SLQLQMNSLRVEDTAVYYCARDEFPYGMDVWGQGTTVTVSSASTKGPSVFPLAPSSKSTSGGTAALGCLVKDYFPEP
VTVSWNSGALTSGVHTFPAVLQSSGLYSLSSVVTVPSSSLGTQTYICNVNHKPSNTKVDKKVEPKSCDKTH
(SEQ ID NO: 583)
(23) 12847B (REGN17083)
Fab Light Chain
DIQMTQSPSSLSASVGDRVTITCRASQSISSYLNWYQQKPGKAPKLLIYAASSLQSGVPSRFSGSGSGTDFTLTISS
LQPEDFATYYCQQSYSTPPITFGQGTRLEIKRTVAAPSVFIFPPSDEQLKSGTASVVCLLNNFYPREAKVQWKVDNA
LQSGNSQESVTEQDSKDSTYSLSSTLTLSKADYEKHKVYACEVTHQGLSSPVTKSFNRGEC (SEQ ID NO: 584)
Fab Heavy Chain
EVQLVESGGGLVQPGRSLRLSCAASGFTFDDYAMNWVRQAPGKGLEWVSGISWSSGSMDYADSVKGRFTISRDNAKN
SLYLQMNSLRTEDTALYYCAKAREVGDYYGMDVWGQGTTVTVSSASTKGPSVFPLAPSSKSTSGGTAALGCLVKDYF
PEPVTVSWNSGALTSGVHTFPAVLQSSGLYSLSSVVTVPSSSLGTQTYICNVNHKPSNTKVDKKVEPKSCDKTH
(SEQ ID NO: 585);
or
EVQLVESGGGLVQPGRSLRLSCAASGFTFDDYAMNWVRQAPGKGLEWVSGISWSSGSMDYADSVKGRFTISRDNAKN
SLYLQMNSLRTEDTALYYCAKAREVGDYYGMDVWGQGTTVTVSSASTKGPSVFPLAPCSRSTSESTAALGCLVKDYF
PEPVTVSWNSGALTSGVHTFPAVLQSSGLYSLSSVVTVPSSSLGTKTYTCNVDHKPSNTKVDKRVESKYGPPLLQGS
G (SEQ ID NO: 606);
or
EVQLVESGGGLVQPGRSLRLSCAASGFTFDDYAMNWVRQAPGKGLEWVSGISWSSGSMDYADSVKGRFTISRDNAKN
SLYLQMNSLRTEDTALYYCAKAREVGDYYGMDVWGQGTTVTVSSASTKGPSVFPLAPCSRSTSESTAALGCLVKDYF
PEPVTVSWNSGALTSGVHTFPAVLQSSGLYSLSSVVTVPSSSLGTKTYTCNVDHKPSNTKVDKRVESKYGPP
(SEQ ID NO: 635)
(24) 12848B
Fab Light Chain
EIVLTQSPGTLSLSPGERATLSCRASQSVSSSYLAWYQQKPGQAPRLLIYGASSRATGIPDRESGSGSGTDFTLTIS
RLEPEDFAVYYCQQYGSSPWTFGQGTKVEIKRTVAAPSVFIFPPSDEQLKSGTASVVCLLNNFYPREAKVQWKVDNA
LQSGNSQESVTEQDSKDSTYSLSSTLTLSKADYEKHKVYACEVTHQGLSSPVTKSFNRGEC (SEQ ID NO: 586)
Fab Heavy Chain
EVQLVESGGGLVQPGRSLTLSCAASGFTFDNFGMHWVRQGPGKGLEWVSGLTWNSGVIGYADSVKGRFTISRDNAKN
SLYLQMNSLRPEDTALYYCAKDIRNYGPFDYWGQGTLVTVSSASTKGPSVFPLAPSSKSTSGGTAALGCLVKDYFPE
PVTVSWNSGALTSGVHTFPAVLQSSGLYSLSSVVTVPSSSLGTQTYICNVNHKPSNTKVDKKVEPKSCDKTH
(SEQ ID NO: 587)
(25) 12843B (REGN17081)
Fab Light Chain
DIQMTQSPSSLSASVGDRVTITCRASQSISSYLNWYQQKPGKAPKLLIYAASSLQSGVPSRFSGSGSGTDFTLTISS
LQPEDFATYYCQQSYSTPPITFGQGTRLEIKRTVAAPSVFIFPPSDEQLKSGTASVVCLLNNFYPREAKVQWKVDNA
LQSGNSQESVTEQDSKDSTYSLSSTLTLSKADYEKHKVYACEVTHQGLSSPVTKSFNRGEC (SEQ ID NO: 588)
Fab Heavy Chain
EVQLVESGGGLVQPGGSLRLSCAASGFTENIFEMNWVRQAPGKGLEWISYISSRGTTTYYADSVRGRFTISRDNAKN
SLYLQMNSLRAEDTAVYYCARDYEATIPFDFWGQGTLVTVSSASTKGPSVFPLAPSSKSTSGGTAALGCLVKDYFPE
PVTVSWNSGALTSGVHTFPAVLQSSGLYSLSSVVTVPSSSLGTQTYICNVNHKPSNTKVDKKVEPKSCDKTH
(SEQ ID NO: 589);
or
EVQLVESGGGLVQPGGSLRLSCAASGFTFNIFEMNWVRQAPGKGLEWISYISSRGTTTYYADSVRGRFTISRDNAKN
SLYLQMNSLRAEDTAVYYCARDYEATIPFDFWGQGTLVTVSSASTKGPSVFPLAPCSRSTSESTAALGCLVKDYFPE
PVTVSWNSGALTSGVHTFPAVLQSSGLYSLSSVVTVPSSSLGTKTYTCNVDHKPSNTKVDKRVESKYGPPLLQGSG
(SEQ ID NO: 607);
or
EVQLVESGGGLVQPGGSLRLSCAASGFTFNIFEMNWVRQAPGKGLEWISYISSRGTTTYYADSVRGRFTISRDNAKN
SLYLQMNSLRAEDTAVYYCARDYEATIPFDFWGQGTLVTVSSASTKGPSVFPLAPCSRSTSESTAALGCLVKDYFPE
PVTVSWNSGALTSGVHTFPAVLQSSGLYSLSSVVTVPSSSLGTKTYTCNVDHKPSNTKVDKRVESKYGPP
(SEQ ID NO: 636)
(26) 12844B
Fab Light Chain
DIQMTQSPSSLSASVGDRVTITCRASQSISSYLNWYQQKPGKAPKLLIYAASSLQSGVPSRFSGSGSGTDFTLTISS
LQPEDFATYYCQQSYSTPPITFGQGTRLEIKRTVAAPSVFIFPPSDEQLKSGTASVVCLLNNFYPREAKVQWKVDNA
LQSGNSQESVTEQDSKDSTYSLSSTLTLSKADYEKHKVYACEVTHQGLSSPVTKSFNRGEC (SEQ ID NO: 590)
Fab Heavy Chain
EVQLVESGGSVVRPGGSLRLSCEASGFTFDDYGMSWVRQDPGKGLEWVSGINWNGDRTNYADSVKGRFIISRDNAKN
SVYLQMNSLRAEDSALYHCARDQGLGVAATLDYWGQGTLVTVSSASTKGPSVFPLAPSSKSTSGGTAALGCLVKDYF
PEPVTVSWNSGALTSGVHTFPAVLQSSGLYSLSSVVTVPSSSLGTQTYICNVNHKPSNTKVDKKVEPKSCDKTH
(SEQ ID NO: 591)
(27) 12845B (REGN17082)
Fab Light Chain
DIQMTQSPSSLSASVGDRVTITCRASQSISSYLNWYQQKPGKAPKLLIYAASSLQSGVPSRFSGSGSGTDFTLTISS
LQPEDFATYYCQQSYSTPPITFGQGTRLEIKRTVAAPSVFIFPPSDEQLKSGTASVVCLLNNFYPREAKVQWKVDNA
LQSGNSQESVTEQDSKDSTYSLSSTLTLSKADYEKHKVYACEVTHQGLSSPVTKSFNRGEC (SEQ ID NO: 592)
Fab Heavy Chain
EVQLVESGGGLVQPGGSLRLSCAASGFTVSNYEMNWVRQAPGKGLEWVSYISSSTSNIYYADSVKGRFTISRDNAEN
SLYLQMNSLRVEDTAVYYCVRDGIVVVPVGRGYYYYGLDVWGQGTTVTVSSASTKGPSVFPLAPSSKSTSGGTAALG
CLVKDYFPEPVTVSWNSGALTSGVHTFPAVLQSSGLYSLSSVVTVPSSSLGTQTYICNVNHKPSNTKVDKKVEPKSC
DKTH (SEQ ID NO: 593);
or
EVQLVESGGGLVQPGGSLRLSCAASGFTVSNYEMNWVRQAPGKGLEWVSYISSSTSNIYYADSVKGRFTISRDNAEN
SLYLQMNSLRVEDTAVYYCVRDGIVVVPVGRGYYYYGLDVWGQGTTVTVSSASTKGPSVFPLAPCSRSTSESTAALG
CLVKDYFPEPVTVSWNSGALTSGVHTFPAVLQSSGLYSLSSVVTVPSSSLGTKTYTCNVDHKPSNTKVDKRVESKYG
PPLLQGSG
(SEQ ID NO: 608);
or
EVQLVESGGGLVQPGGSLRLSCAASGFTVSNYEMNWVRQAPGKGLEWVSYISSSTSNIYYADSVKGRFTISRDNAEN
SLYLQMNSLRVEDTAVYYCVRDGIVVVPVGRGYYYYGLDVWGQGTTVTVSSASTKGPSVFPLAPCSRSTSESTAALG
CLVKDYFPEPVTVSWNSGALTSGVHTFPAVLQSSGLYSLSSVVTVPSSSLGTKTYTCNVDHKPSNTKVDKRVESKYG
PP (SEQ ID NO: 637)
(28) 12839B (REGN17080)
Fab Light Chain
DIQMTQSPSSLSASVGDRVTITCRASQSISSYLNWYQQKPGKAPKLLIYAASSLQSGVPSRFSGSGSGTDFTLTISS
LQPEDFATYYCQQSYSTPPITFGQGTRLEIKRTVAAPSVFIFPPSDEQLKSGTASVVCLLNNFYPREAKVQWKVDNA
LQSGNSQESVTEQDSKDSTYSLSSTLTLSKADYEKHKVYACEVTHQGLSSPVTKSFNRGEC (SEQ ID NO: 594)
Fab Heavy Chain
QVQLVESGGGVVQPGRSLRLSCAASGFPFSNYVMYWVRQAPGKGLEWVALIFFDGKKNYHADSVKGRFTITRDNSKN
MLYLQMNSLRPEDAAVYYCAKIHCPNGVCYKGYYGMDVWGQGTTVTVSSASTKGPSVFPLAPSSKSTSGGTAALGCL
VKDYFPEPVTVSWNSGALTSGVHTFPAVLQSSGLYSLSSVVTVPSSSLGTQTYICNVNHKPSNTKVDKKVEPKSCDK
TH (SEQ ID NO: 595);
or
QVQLVESGGGVVQPGRSLRLSCAASGFPFSNYVMYWVRQAPGKGLEWVALIFFDGKKNYHADSVKGRFTITRDNSKN
MLYLQMNSLRPEDAAVYYCAKIHCPNGVCYKGYYGMDVWGQGTTVTVSSASTKGPSVFPLAPCSRSTSESTAALGCL
VKDYFPEPVTVSWNSGALTSGVHTFPAVLQSSGLYSLSSVVTVPSSSLGTKTYTCNVDHKPSNTKVDKRVESKYGPP
LLQGSG (SEQ ID NO: 609);
or
QVQLVESGGGVVQPGRSLRLSCAASGFPFSNYVMYWVRQAPGKGLEWVALIFFDGKKNYHADSVKGRFTITRDNSKN
MLYLQMNSLRPEDAAVYYCAKIHCPNGVCYKGYYGMDVWGQGTTVTVSSASTKGPSVFPLAPCSRSTSESTAALGCL
VKDYFPEPVTVSWNSGALTSGVHTFPAVLQSSGLYSLSSVVTVPSSSLGTKTYTCNVDHKPSNTKVDKRVESKYGPP
(SEQ ID NO: 638)
(29) H1H12841B
Fab Light Chain
DIQMTQSPSSLSASVGDRVTITCRASQSISSYLNWYQQKPGKAPKLLIYAASSLQSGVPSRFSGSGSGTDFTLTISS
LQPEDFATYYCQQSYSTPPITFGQGTRLEIKRTVAAPSVFIFPPSDEQLKSGTASVVCLLNNFYPREAKVQWKVDNA
LQSGNSQESVTEQDSKDSTYSLSSTLTLSKADYEKHKVYACEVTHQGLSSPVTKSFNRGEC (SEQ ID NO: 596)
Fab Heavy Chain
EVQLVESGGGLVQPGGSLRLSCAASGFTFSNYWMNWVRQAPGKGLEWVANIKEDGGKKLYVDSVKGRFTISRDNAKN
SLFLQMNSLRAEDTAVYYCAREDTTLVVDYYYYGMDVWGQGTTVTVSSASTKGPSVFPLAPSSKSTSGGTAALGCLV
KDYFPEPVTVSWNSGALTSGVHTFPAVLQSSGLYSLSSVVTVPSSSLGTQTYICNVNHKPSNTKVDKKVEPKSCDKT
H (SEQ ID NO: 597)
(30) 12850B
Fab Light Chain
EIVLTQSPGTLSLSPGERATLSCRASQSVSSSYLAWYQQKPGQAPRLLIYGASSRATGIPDRESGSGSGTDFTLTIS
RLEPEDFAVYYCQQYGSSPWTFGQGTKVEIKRTVAAPSVFIFPPSDEQLKSGTASVVCLLNNFYPREAKVQWKVDNA
LQSGNSQESVTEQDSKDSTYSLSSTLTLSKADYEKHKVYACEVTHQGLSSPVTKSFNRGEC (SEQ ID NO: 598)
Fab Heavy Chain
QVQLVQSGAEVKKPGSSVKVSCKASGGTENTYAITWVRQAPGQGLEWMGGIIPISGIAEYAQKFQGRVTITTDDSST
TAYMELNSLRSEDTAVYYCASWNYALYYFYGMDVWGRGTTVTVSSASTKGPSVFPLAPSSKSTSGGTAALGCLVKDY
FPEPVTVSWNSGALTSGVHTFPAVLQSSGLYSLSSVVTVPSSSLGTQTYICNVNHKPSNTKVDKKVEPKSCDKTH
(SEQ ID NO: 599)
(31) 69261
Fab Light Chain
DIVMTQSPLSLPVTPGEPASISCRSSQSLLHSNGYNYLDWYLQKPGQSPQFLIYLGSNRASGVPDRFSGSGSGTDFT
LKINRVEAEDVGVYYCMQALQTPYTFGQGTKLEIKRTVAAPSVFIFPPSDEQLKSGTASVVCLLNNFYPREAKVQWK
VDNALQSGNSQESVTEQDSKDSTYSLSSTLTLSKADYEKHKVYACEVTHQGLSSPVTKSFNRGEC
(SEQ ID NO: 600)
Fab Heavy Chain
QVQLVESGGGLVKPGGSLRLSCAASGFTFSVYYMNWIRQAPGKGLEWVSYISSSGSTIYYADSVKGRFTISRDNAKN
SLYLQMNSLRAEDTAVYYCGREGYSGTYSYYGMDVWGQGTTVTVSSASTKGPSVFPLAPSSKSTSGGTAALGCLVKD
YFPEPVTVSWNSGALTSGVHTFPAVLQSSGLYSLSSVVTVPSSSLGTQTYICNVNHKPSNTKVDKKVEPKSCDKTH
(SEQ ID NO: 601)
(32) 69263
Fab Light Chain
DIQMTQSPSSLSASVGDRVTITCRASQDISHYSAWYQQKPGKLPNLLIYAASTLQSGVPSRFSGSGSGTDFSLTTSS
LQPEDVATYYCQKYNSVPLTFGGGTKVEIKRTVAAPSVFIFPPSDEQLKSGTASVVCLLNNFYPREAKVQWKVDNAL
QSGNSQESVTEQDSKDSTYSLSSTLTLSKADYEKHKVYACEVTHQGLSSPVTKSFNRGEC (SEQ ID NO: 602)
Fab Heavy Chain
EVQLVESGGGLVQPGRSLRLSCAVSGFTFDDYAMHWVRQAPGKGLEWVSGISWNSGTRGYADSVKGRFTISRDNAKN
SLYLQMNSLRGEDTALYYCVKDITISPNYYGMDVWGQGTTVTVSSASTKGPSVFPLAPSSKSTSGGTAALGCLVKDY
FPEPVTVSWNSGALTSGVHTFPAVLQSSGLYSLSSVVTVPSSSLGTQTYICNVNHKPSNTKVDKKVEPKSCDKTH
(SEQ ID NO: 603)

[0227] In an embodiment, an anti-TfR antigen-binding protein, e.g., antibody or antigen-binding fragment (which may be tethered to a payload) comprises an IgG1 heavy chain constant domain comprising the sequence set forth in SEQ ID NO: 796: ASTKGPSVFPLAPSSKSTSGGTAALGCLVKDYFPEPVTVSWNSGALTSGVHTFPAVLQSSGLYSLSSVVTVPSSSLG TQTYICNVNHKPSNTKVDKKVEPKSCDKTHTCPPCPAPELLGGPSVFLFPPKPKDTLMISRTPEVTCVVVDVSHEDP EVKFNWYVDGVEVHNAKTKPREEQYNSTYRVVSVLTVLHQDWLNGKEYKCKVSNKALPAPIEKTISKAKGQPREPQV YTLPPSRDELTKNQVSLTCLVKGFYPSDIAVEWESNGQPENNYKTTPPVLDSDGSFFLYSKLTVDKSRWQQGNVFSC SVMHEALHNHYTQKSLSLSPGK (see, e.g., sequences of Table 4, or variants thereof). In an embodiment, an antigen-binding protein, e.g., antibody or antigen-binding fragment, comprises a light chain constant domain, e.g., of the type kappa or lambda. In an embodiment, a V_{H} as set forth herein is linked to a human heavy chain constant domain (e.g., IgG) and a V_{L} as set forth herein is linked to a human light chain constant domain (e.g., kappa). The present disclosure includes antigen-binding proteins comprising the variable domains set forth herein, which are linked to a heavy and/or light chain constant domain, e.g., as set forth herein.

TABLE 4
Heavy Chain Full hIgG1 Sequences.

| Identifier | HC Full hIgG1 sequence |
|---|---|
| 31874B | EVQLVESGGGLVQPGGSLRLSCAASGFAFSSYAMTWVRQAPGKGLEWVSVISGTGGSTYYADSVKG |
| | RFTISRDNSKNTLYLQMNSLRAEDTAVYYCAKGGAARRMEYFQYWGQGTLVTVSSASTKGPSVFPL |
| | APSSKSTSGGTAALGCLVKDYFPEPVTVSWNSGALTSGVHTFPAVLQSSGLYSLSSVVTVPSSSLG |
| | TQTYICNVNHKPSNTKVDKKVEPKSCDKTHTCPPCPAPELLGGPSVFLFPPKPKDTLMISRTPEVT |
| | CVVVDVSHEDPEVKFNWYVDGVEVHNAKTKPREEQYNSTYRVVSVLTVLHQDWLNGKEYKCKVSNK |
| | ALPAPIEKTISKAKGQPREPQVYTLPPSRDELTKNQVSLTCLVKGFYPSDIAVEWESNGQPENNYK |
| | TTPPVLDSDGSFFLYSKLTVDKSRWQQGNVFSCSVMHEALHNHYTQKSLSLSPGK |
| | (SEQ ID NO: 764) |
| 31863B | EVQLVESGGGLVQPGGSLRLSCAASGFTENSYAMTWVRQAPGKGLEWVSFIGGSTGNTYYAGSVKG |
| | RFTISSDNSKKTLYLQMNSLRAEDTAVYYCAKGGAARRMEYFQHWGQGTLVTVSSASTKGPSVFPL |
| | APSSKSTSGGTAALGCLVKDYFPEPVTVSWNSGALTSGVHTFPAVLQSSGLYSLSSVVTVPSSSLG |
| | TQTYICNVNHKPSNTKVDKKVEPKSCDKTHTCPPCPAPELLGGPSVFLFPPKPKDTLMISRTPEVT |
| | CVVVDVSHEDPEVKFNWYVDGVEVHNAKTKPREEQYNSTYRVVSVLTVLHQDWLNGKEYKCKVSNK |
| | ALPAPIEKTISKAKGQPREPQVYTLPPSRDELTKNQVSLTCLVKGFYPSDIAVEWESNGQPENNYK |
| | TTPPVLDSDGSFFLYSKLTVDKSRWQQGNVFSCSVMHEALHNHYTQKSLSLSPGK |
| | (SEQ ID NO: 765) |
| 69348 | QVQLVESGGGVVQPGRSLRLSCAASGFTFTTYGMHWVRQAPGKGLEWVAVIWYDGSNKYYGDSVKG |
| | RFTISRDNSKNTLYLQMNSLRVDDTAVYYCTRTHGYTRSSDGFDYWGQGTLVTVSSASTKGPSVFP |
| | LAPSSKSTSGGTAALGCLVKDYFPEPVTVSWNSGALTSGVHTFPAVLQSSGLYSLSSVVTVPSSSL |
| | GTQTYICNVNHKPSNTKVDKKVEPKSCDKTHTCPPCPAPELLGGPSVFLFPPKPKDTLMISRTPEV |
| | TCVVVDVSHEDPEVKFNWYVDGVEVHNAKTKPREEQYNSTYRVVSVLTVLHQDWLNGKEYKCKVSN |
| | KALPAPIEKTISKAKGQPREPQVYTLPPSRDELTKNQVSLTCLVKGFYPSDIAVEWESNGQPENNY |
| | KTTPPVLDSDGSFFLYSKLTVDKSRWQQGNVFSCSVMHEALHNHYTQKSLSLSPGK |
| | (SEQ ID NO: 766) |
| 69340 | EVQLVESGGGLVQPGRSLRLSCAASGFTFDDKAMHWVRQVPGKGLEWISGISWNSGTIGYADSVKG |
| | RFIISRDNAKNSLYLQMNSLRAEDTALYYCAKDGDTSGWYWYGLDVWGQGTTVTVSSASTKGPSVF |
| | PLAPSSKSTSGGTAALGCLVKDYFPEPVTVSWNSGALTSGVHTFPAVLQSSGLYSLSSVVTVPSSS |
| | LGTQTYICNVNHKPSNTKVDKKVEPKSCDKTHTCPPCPAPELLGGPSVFLFPPKPKDTLMISRTPE |
| | VTCVVVDVSHEDPEVKFNWYVDGVEVHNAKTKPREEQYNSTYRVVSVLTVLHQDWLNGKEYKCKVS |
| | NKALPAPIEKTISKAKGQPREPQVYTLPPSRDELTKNQVSLTCLVKGFYPSDIAVEWESNGQPENN |
| | YKTTPPVLDSDGSFFLYSKLTVDKSRWQQGNVFSCSVMHEALHNHYTQKSLSLSPGK |
| | (SEQ ID NO: 767) |
| 69331 | QVQLVESGGGVVQPGRSLRLSCIASGFTFSVYGIHWVRQAPGKGLEWMAVISHDGNIKHYADSVKG |
| | RFTISRDNSKNTLYLQINSLRTEDTAVYYCAKDTWNSLDTFDIWGQGTMVTVSSASTKGPSVFPLA |
| | PSSKSTSGGTAALGCLVKDYFPEPVTVSWNSGALTSGVHTFPAVLQSSGLYSLSSVVTVPSSSLGT |
| | QTYICNVNHKPSNTKVDKKVEPKSCDKTHTCPPCPAPELLGGPSVFLFPPKPKDTLMISRTPEVTC |
| | VVVDVSHEDPEVKFNWYVDGVEVHNAKTKPREEQYNSTYRVVSVLTVLHQDWLNGKEYKCKVSNKA |
| | LPAPIEKTISKAKGQPREPQVYTLPPSRDELTKNQVSLTCLVKGFYPSDIAVEWESNGQPENNYKT |
| | TPPVLDSDGSFFLYSKLTVDKSRWQQGNVFSCSVMHEALHNHYTQKSLSLSPGK |
| | (SEQ ID NO: 768) |
| 69332 | QVTLRESGPALVKPSQTLTLTCTFSGFSLNTYGMFVSWIRQPPGKALEWLAHIHWDDDKYYSTSLK |
| | TRLTISKDTSKNQVVLTMTNMDPVDTATYYCARGHNNLNYIIHWGQGTLVTVSSASTKGPSVFPLA |
| | PSSKSTSGGTAALGCLVKDYFPEPVTVSWNSGALTSGVHTFPAVLQSSGLYSLSSVVTVPSSSLGT |
| | QTYICNVNHKPSNTKVDKKVEPKSCDKTHTCPPCPAPELLGGPSVFLFPPKPKDTLMISRTPEVTC |
| | VVVDVSHEDPEVKFNWYVDGVEVHNAKTKPREEQYNSTYRVVSVLTVLHQDWLNGKEYKCKVSNKA |
| | LPAPIEKTISKAKGQPREPQVYTLPPSRDELTKNQVSLTCLVKGFYPSDIAVEWESNGQPENNYKT |
| | TPPVLDSDGSFFLYSKLTVDKSRWQQGNVFSCSVMHEALHNHYTQKSLSLSPGK |
| | (SEQ ID NO: 769) |
| 69326 | EVQLVESGGGLVQPGGSLRLSCAVSGFIFSSYEMNWVRQAPGKGLEWVSYISSSGSTIFYADSVKG |
| | RFTISRDNAKNSLYLQMNSLRAEDTAVYYCVSGVVLFDVWGQGTMVTVSSASTKGPSVFPLAPSSK |
| | STSGGTAALGCLVKDYFPEPVTVSWNSGALTSGVHTFPAVLQSSGLYSLSSVVTVPSSSLGTQTYI |
| | CNVNHKPSNTKVDKKVEPKSCDKTHTCPPCPAPELLGGPSVFLFPPKPKDTLMISRTPEVTCVVVD |
| | VSHEDPEVKFNWYVDGVEVHNAKTKPREEQYNSTYRVVSVLTVLHQDWLNGKEYKCKVSNKALPAP |
| | IEKTISKAKGQPREPQVYTLPPSRDELTKNQVSLTCLVKGFYPSDIAVEWESNGQPENNYKTTPPV |
| | LDSDGSFFLYSKLTVDKSRWQQGNVFSCSVMHEALHNHYTQKSLSLSPGK |
| | (SEQ ID NO: 770) |
| 69329 | EVQLVESGGGLVQPGGSLRLSCAASGFTFSNYWMTWVRQAPGKGLEWVANIKEDGSEKDYVDSVKG |
| | RFTISRDNAKNSLYLQMNSLRGEDTAVYYCARDGEQLVDYYYYYVMDVWGQGTTVTVSSASTKGPS |
| | VFPLAPSSKSTSGGTAALGCLVKDYFPEPVTVSWNSGALTSGVHTFPAVLQSSGLYSLSSVVTVPS |
| | SSLGTQTYICNVNHKPSNTKVDKKVEPKSCDKTHTCPPCPAPELLGGPSVFLFPPKPKDTLMISRT |
| | PEVTCVVVDVSHEDPEVKFNWYVDGVEVHNAKTKPREEQYNSTYRVVSVLTVLHQDWLNGKEYKCK |
| | VSNKALPAPIEKTISKAKGQPREPQVYTLPPSRDELTKNQVSLTCLVKGFYPSDIAVEWESNGQPE |
| | NNYKTTPPVLDSDGSFFLYSKLTVDKSRWQQGNVFSCSVMHEALHNHYTQKSLSLSPGK |
| | (SEQ ID NO: 771) |
| 69323 | EVQLVESGGGLVQPGRSLRLSCAASGFTFDDYAMHWVRQAPGKGLEWVSGISWNSGYIGYADSVKG |
| | RFTISRDNAENSLHLQMNSLRAEDTALYYCARGGSTLVRGVKGGYYGMDVWGQGTTVTVSSASTKG |
| | PSVFPLAPSSKSTSGGTAALGCLVKDYFPEPVTVSWNSGALTSGVHTFPAVLQSSGLYSLSSVVTV |
| | PSSSLGTQTYICNVNHKPSNTKVDKKVEPKSCDKTHTCPPCPAPELLGGPSVFLFPPKPKDTLMIS |
| | RTPEVTCVVVDVSHEDPEVKFNWYVDGVEVHNAKTKPREEQYNSTYRVVSVLTVLHQDWLNGKEYK |
| | CKVSNKALPAPIEKTISKAKGQPREPQVYTLPPSRDELTKNQVSLTCLVKGFYPSDIAVEWESNGQ |
| | PENNYKTTPPVLDSDGSFFLYSKLTVDKSRWQQGNVFSCSVMHEALHNHYTQKSLSLSPGK |
| | (SEQ ID NO: 772) |
| 69305 | QVQLVESGGGVVQPGRSLRLSCAASGFTFSSYGMHWVRQAPGKGLEWVAVIWYDGSNKYYADSVKG |
| | RFTISRDISKNTLYLQMNSLRAEDTAVYYCAGQLDLFFDYWGQGTLVTVSSASTKGPSVFPLAPSS |
| | KSTSGGTAALGCLVKDYFPEPVTVSWNSGALTSGVHTFPAVLQSSGLYSLSSVVTVPSSSLGTQTY |
| | ICNVNHKPSNTKVDKKVEPKSCDKTHTCPPCPAPELLGGPSVFLFPPKPKDTLMISRTPEVTCVVV |
| | DVSHEDPEVKFNWYVDGVEVHNAKTKPREEQYNSTYRVVSVLTVLHQDWLNGKEYKCKVSNKALPA |
| | PIEKTISKAKGQPREPQVYTLPPSRDELTKNQVSLTCLVKGFYPSDIAVEWESNGQPENNYKTTPP |
| | VLDSDGSFFLYSKLTVDKSRWQQGNVFSCSVMHEALHNHYTQKSLSLSPGK |
| | (SEQ ID NO: 773) |
| 69307 | EVQLVESGGGLVQPGGSLRLSCTASGFTFSNYWMTWVRQAPGKGLEWVANIKEDGSEKEYVDSVKG |
| | RFTISRDNAKNSLYLQMNSLRGEDTAVYYCARDGEQLVDYYYYYVMDVWGQGTTVTVSSASTKGPS |
| | VFPLAPSSKSTSGGTAALGCLVKDYFPEPVTVSWNSGALTSGVHTFPAVLQSSGLYSLSSVVTVPS |
| | SSLGTQTYICNVNHKPSNTKVDKKVEPKSCDKTHTCPPCPAPELLGGPSVFLFPPKPKDTLMISRT |
| | PEVTCVVVDVSHEDPEVKFNWYVDGVEVHNAKTKPREEQYNSTYRVVSVLTVLHQDWLNGKEYKCK |
| | VSNKALPAPIEKTISKAKGQPREPQVYTLPPSRDELTKNQVSLTCLVKGFYPSDIAVEWESNGQPE |
| | NNYKTTPPVLDSDGSFFLYSKLTVDKSRWQQGNVFSCSVMHEALHNHYTQKSLSLSPGK |
| | (SEQ ID NO: 774) |
| 12795B | EVQLVESGGGLVQPGGSLRLSCATSGFTFTSYDMKWVRQAPGLGLEWVSAISGSGGNTYYADSVKG |
| | RFTISRDNSRNTLYLQMNSLRAEDTAVYYCTRSHDFGAFDYFDYWGQGTLVTVSSASTKGPSVFPL |
| | APSSKSTSGGTAALGCLVKDYFPEPVTVSWNSGALTSGVHTFPAVLQSSGLYSLSSVVTVPSSSLG |
| | TQTYICNVNHKPSNTKVDKKVEPKSCDKTHTCPPCPAPELLGGPSVFLFPPKPKDTLMISRTPEVT |
| | CVVVDVSHEDPEVKFNWYVDGVEVHNAKTKPREEQYNSTYRVVSVLTVLHQDWLNGKEYKCKVSNK |
| | ALPAPIEKTISKAKGQPREPQVYTLPPSRDELTKNQVSLTCLVKGFYPSDIAVEWESNGQPENNYK |
| | TTPPVLDSDGSFFLYSKLTVDKSRWQQGNVFSCSVMHEALHNHYTQKSLSLSPGK |
| | (SEQ ID NO: 775) |
| 12798B | EVQLVESGGDLVQPGRSLRLSCAASGFTEDDYAMHWVRQAPGKGLEWVSGISWNSATRVYADSVKG |
| | RFTISRDNAKNFLYLQMNSLRSEDTALYHCAKDMDISLGYYGLDVWGQGTTVTVSSASTKGPSVFP |
| | LAPSSKSTSGGTAALGCLVKDYFPEPVTVSWNSGALTSGVHTFPAVLQSSGLYSLSSVVTVPSSSL |
| | GTQTYICNVNHKPSNTKVDKKVEPKSCDKTHTCPPCPAPELLGGPSVFLFPPKPKDTLMISRTPEV |
| | TCVVVDVSHEDPEVKFNWYVDGVEVHNAKTKPREEQYNSTYRVVSVLTVLHQDWLNGKEYKCKVSN |
| | KALPAPIEKTISKAKGQPREPQVYTLPPSRDELTKNQVSLTCLVKGFYPSDIAVEWESNGQPENNY |
| | KTTPPVLDSDGSFFLYSKLTVDKSRWQQGNVFSCSVMHEALHNHYTQKSLSLSPGK |
| | (SEQ ID NO: 776) |
| 12799B | QITLKESGPTLVKPTQTLTLTCTFSGFSLSTSGVGVVWIRQPPGKALEWLALIYWNDHKRYSPSLG |
| | SRLTITKDTSKNQVVLTMTNMDPVDTATYYCAHYSGSYSYYYYGLDVWGQGTTVTVSSASTKGPSV |
| | FPLAPSSKSTSGGTAALGCLVKDYFPEPVTVSWNSGALTSGVHTFPAVLQSSGLYSLSSVVTVPSS |
| | SLGTQTYICNVNHKPSNTKVDKKVEPKSCDKTHTCPPCPAPELLGGPSVFLFPPKPKDTLMISRTP |
| | EVTCVVVDVSHEDPEVKFNWYVDGVEVHNAKTKPREEQYNSTYRVVSVLTVLHQDWLNGKEYKCKV |
| | SNKALPAPIEKTISKAKGQPREPQVYTLPPSRDELTKNQVSLTCLVKGFYPSDIAVEWESNGQPEN |
| | NYKTTPPVLDSDGSFFLYSKLTVDKSRWQQGNVFSCSVMHEALHNHYTQKSLSLSPGK |
| | (SEQ ID NO: 777) |
| 12801B | EVQLLESGGALVQPGGSLRLSCAASGFTFTSYAMHWVRQAPGKGLEWVSSIRGSGGGTYSADSVKG |
| | RFTISRDNSRDTLYLQMNSVRAEDTAVYYCARSHDYGAFDFFDYWGQGTLVTVSSASTKGPSVEPL |
| | APSSKSTSGGTAALGCLVKDYFPEPVTVSWNSGALTSGVHTFPAVLQSSGLYSLSSVVTVPSSSLG |
| | TQTYICNVNHKPSNTKVDKKVEPKSCDKTHTCPPCPAPELLGGPSVFLFPPKPKDTLMISRTPEVT |
| | CVVVDVSHEDPEVKFNWYVDGVEVHNAKTKPREEQYNSTYRVVSVLTVLHQDWLNGKEYKCKVSNK |
| | ALPAPIEKTISKAKGQPREPQVYTLPPSRDELTKNQVSLTCLVKGFYPSDIAVEWESNGQPENNYK |
| | TTPPVLDSDGSFFLYSKLTVDKSRWQQGNVFSCSVMHEALHNHYTQKSLSLSPGK |
| | (SEQ ID NO: 778) |
| 12802B | QVQLVESGGGLVKPGGSLRLSCAASGFTFSDYFMSWIRQAPGKGLEWVSYISSTGSTINYADSVKG |
| | RFTISRDNVKNSLYLQMTSLRVEDTAVYYCTRDNWNYEYWGQGTLVTVSSASTKGPSVFPLAPSSK |
| | STSGGTAALGCLVKDYFPEPVTVSWNSGALTSGVHTFPAVLQSSGLYSLSSVVTVPSSSLGTQTYI |
| | CNVNHKPSNTKVDKKVEPKSCDKTHTCPPCPAPELLGGPSVFLFPPKPKDTLMISRTPEVTCVVVD |
| | VSHEDPEVKFNWYVDGVEVHNAKTKPREEQYNSTYRVVSVLTVLHQDWLNGKEYKCKVSNKALPAP |
| | IEKTISKAKGQPREPQVYTLPPSRDELTKNQVSLTCLVKGFYPSDIAVEWESNGQPENNYKTTPPV |
| | LDSDGSFFLYSKLTVDKSRWQQGNVFSCSVMHEALHNHYTQKSLSLSPGK |
| | (SEQ ID NO: 779) |
| 12808B | QLQLQESGPGLVKPSETLSLTCTVSGESISSNTYYWGWIRQPPGKGLEWIGSIDYSGTTNYNPSLK |
| | SRVTISVDTSRNHFSLRLRSVTAADTAVYYCAREWGNYGYYYGMDVWGQGTTVTVSSASTKGPSVF |
| | PLAPSSKSTSGGTAALGCLVKDYFPEPVTVSWNSGALTSGVHTFPAVLQSSGLYSLSSVVTVPSSS |
| | LGTQTYICNVNHKPSNTKVDKKVEPKSCDKTHTCPPCPAPELLGGPSVFLFPPKPKDTLMISRTPE |
| | VTCVVVDVSHEDPEVKFNWYVDGVEVHNAKTKPREEQYNSTYRVVSVLTVLHQDWLNGKEYKCKVS |
| | NKALPAPIEKTISKAKGQPREPQVYTLPPSRDELTKNQVSLTCLVKGFYPSDIAVEWESNGQPENN |
| | YKTTPPVLDSDGSFFLYSKLTVDKSRWQQGNVFSCSVMHEALHNHYTQKSLSLSPGK |
| | (SEQ ID NO: 780) |
| 12812B | QVQLVQSGAEVKKPGSSVRVSCKASRGTESSYAISWVRQAPGQGLEWMGGIIPIFGTANYAQKFLA |
| | RVTITADESTSTAYMELSSLRSEDTAVYYCAREKGWNYFDYWGQGTLVTVSSASTKGPSVFPLAPS |
| | SKSTSGGTAALGCLVKDYFPEPVTVSWNSGALTSGVHTFPAVLQSSGLYSLSSVVTVPSSSLGTQT |
| | YICNVNHKPSNTKVDKKVEPKSCDKTHTCPPCPAPELLGGPSVFLFPPKPKDTLMISRTPEVTCVV |
| | VDVSHEDPEVKFNWYVDGVEVHNAKTKPREEQYNSTYRVVSVLTVLHQDWLNGKEYKCKVSNKALP |
| | APIEKTISKAKGQPREPQVYTLPPSRDELTKNQVSLTCLVKGFYPSDIAVEWESNGQPENNYKTTP |
| | PVLDSDGSFFLYSKLTVDKSRWQQGNVFSCSVMHEALHNHYTQKSLSLSPGK |
| | (SEQ ID NO: 781) |
| 12816B | QVQLVESGGGLVKPGGSLRLSCAASGFTFSDYYMNWIRQAPGKGLEWVSYISSSGTTIYYADSVKG |
| | RFTISRDNAKKSLYLEMNSLRAEDTAVYYCAREGYGNDYYYYGIDVWGQGTTVTVSSASTKGPSVE |
| | PLAPSSKSTSGGTAALGCLVKDYFPEPVTVSWNSGALTSGVHTFPAVLQSSGLYSLSSVVTVPSSS |
| | LGTQTYICNVNHKPSNTKVDKKVEPKSCDKTHTCPPCPAPELLGGPSVFLFPPKPKDTLMISRTPE |
| | VTCVVVDVSHEDPEVKFNWYVDGVEVHNAKTKPREEQYNSTYRVVSVLTVLHQDWLNGKEYKCKVS |
| | NKALPAPIEKTISKAKGQPREPQVYTLPPSRDELTKNQVSLTCLVKGFYPSDIAVEWESNGQPENN |
| | YKTTPPVLDSDGSFFLYSKLTVDKSRWQQGNVFSCSVMHEALHNHYTQKSLSLSPGK |
| | (SEQ ID NO: 782) |
| 12833B | QVQLVESGGGVVQPGRSLRLSCAASGFTFSSFGMHWVRQAPGKGLEWVIFISYDGSDKYYADSVKG |
| | RFAISRDSSKNTLYLQMNSLRAEDTAVYYCAKFNGILTDSYGMDVWGQGTTVTVSSASTKGPSVFP |
| | LAPSSKSTSGGTAALGCLVKDYFPEPVTVSWNSGALTSGVHTFPAVLQSSGLYSLSSVVTVPSSSL |
| | GTQTYICNVNHKPSNTKVDKKVEPKSCDKTHTCPPCPAPELLGGPSVFLFPPKPKDTLMISRTPEV |
| | TCVVVDVSHEDPEVKFNWYVDGVEVHNAKTKPREEQYNSTYRVVSVLTVLHQDWLNGKEYKCKVSN |
| | KALPAPIEKTISKAKGQPREPQVYTLPPSRDELTKNQVSLTCLVKGFYPSDIAVEWESNGQPENNY |
| | KTTPPVLDSDGSFFLYSKLTVDKSRWQQGNVFSCSVMHEALHNHYTQKSLSLSPGK |
| | (SEQ ID NO: 783) |
| 12834B | QVQLVQSGAEVKKPGASVKVSCKASGYTFTSYGISWVRQAPGQGLEWMGWISVYHGNTNYAQKFQG |
| | RVTMTTDTSTSTAYMELRSLRSDDTAVYYCAREGYYDFWSGYYPFDYWGQGTLVTVSSASTKGPSV |
| | FPLAPSSKSTSGGTAALGCLVKDYFPEPVTVSWNSGALTSGVHTFPAVLQSSGLYSLSSVVTVPSS |
| | SLGTQTYICNVNHKPSNTKVDKKVEPKSCDKTHTCPPCPAPELLGGPSVFLFPPKPKDTLMISRTP |
| | EVTCVVVDVSHEDPEVKFNWYVDGVEVHNAKTKPREEQYNSTYRVVSVLTVLHQDWLNGKEYKCKV |
| | SNKALPAPIEKTISKAKGQPREPQVYTLPPSRDELTKNQVSLTCLVKGFYPSDIAVEWESNGQPEN |
| | NYKTTPPVLDSDGSFFLYSKLTVDKSRWQQGNVFSCSVMHEALHNHYTQKSLSLSPGK |
| | (SEQ ID NO: 784) |
| 12835B | EVQLVESGGGLIQPGGSLRLSCEASGFTFRNYEMNWVRQAPGKGLEWVSYISSSGNMKDYAESVKG |
| | RFTISRDNVKNSLQLQMNSLRVEDTAVYYCARDEFPYGMDVWGQGTTVTVSSASTKGPSVFPLAPS |
| | SKSTSGGTAALGCLVKDYFPEPVTVSWNSGALTSGVHTFPAVLQSSGLYSLSSVVTVPSSSLGTQT |
| | YICNVNHKPSNTKVDKKVEPKSCDKTHTCPPCPAPELLGGPSVFLFPPKPKDTLMISRTPEVTCVV |
| | VDVSHEDPEVKFNWYVDGVEVHNAKTKPREEQYNSTYRVVSVLTVLHQDWLNGKEYKCKVSNKALP |
| | APIEKTISKAKGQPREPQVYTLPPSRDELTKNQVSLTCLVKGFYPSDIAVEWESNGQPENNYKTTP |
| | PVLDSDGSFFLYSKLTVDKSRWQQGNVFSCSVMHEALHNHYTQKSLSLSPGK |
| | (SEQ ID NO: 785) |
| 12847B | EVQLVESGGGLVQPGRSLRLSCAASGFTEDDYAMNWVRQAPGKGLEWVSGISWSSGSMDYADSVKG |
| | RFTISRDNAKNSLYLQMNSLRTEDTALYYCAKAREVGDYYGMDVWGQGTTVTVSSASTKGPSVFPL |
| | APSSKSTSGGTAALGCLVKDYFPEPVTVSWNSGALTSGVHTFPAVLQSSGLYSLSSVVTVPSSSLG |
| | TQTYICNVNHKPSNTKVDKKVEPKSCDKTHTCPPCPAPELLGGPSVFLFPPKPKDTLMISRTPEVT |
| | CVVVDVSHEDPEVKFNWYVDGVEVHNAKTKPREEQYNSTYRVVSVLTVLHQDWLNGKEYKCKVSNK |
| | ALPAPIEKTISKAKGQPREPQVYTLPPSRDELTKNQVSLTCLVKGFYPSDIAVEWESNGQPENNYK |
| | TTPPVLDSDGSFFLYSKLTVDKSRWQQGNVFSCSVMHEALHNHYTQKSLSLSPGK |
| | (SEQ ID NO: 786) |
| 12848B | EVQLVESGGGLVQPGRSLTLSCAASGFTFDNFGMHWVRQGPGKGLEWVSGLTWNSGVIGYADSVKG |
| | RFTISRDNAKNSLYLQMNSLRPEDTALYYCAKDIRNYGPFDYWGQGTLVTVSSASTKGPSVFPLAP |
| | SSKSTSGGTAALGCLVKDYFPEPVTVSWNSGALTSGVHTFPAVLQSSGLYSLSSVVTVPSSSLGTQ |
| | TYICNVNHKPSNTKVDKKVEPKSCDKTHTCPPCPAPELLGGPSVFLFPPKPKDTLMISRTPEVTCV |
| | VVDVSHEDPEVKFNWYVDGVEVHNAKTKPREEQYNSTYRVVSVLTVLHQDWLNGKEYKCKVSNKAL |
| | PAPIEKTISKAKGQPREPQVYTLPPSRDELTKNQVSLTCLVKGFYPSDIAVEWESNGQPENNYKTT |
| | PPVLDSDGSFFLYSKLTVDKSRWQQGNVFSCSVMHEALHNHYTQKSLSLSPGK |
| | (SEQ ID NO: 787) |
| 12843B | EVQLVESGGGLVQPGGSLRLSCAASGFTFNIFEMNWVRQAPGKGLEWISYISSRGTTTYYADSVRG |
| | RFTISRDNAKNSLYLQMNSLRAEDTAVYYCARDYEATIPFDFWGQGTLVTVSSASTKGPSVFPLAP |
| | SSKSTSGGTAALGCLVKDYFPEPVTVSWNSGALTSGVHTFPAVLQSSGLYSLSSVVTVPSSSLGTQ |
| | TYICNVNHKPSNTKVDKKVEPKSCDKTHTCPPCPAPELLGGPSVFLFPPKPKDTLMISRTPEVTCV |
| | VVDVSHEDPEVKFNWYVDGVEVHNAKTKPREEQYNSTYRVVSVLTVLHQDWLNGKEYKCKVSNKAL |
| | PAPIEKTISKAKGQPREPQVYTLPPSRDELTKNQVSLTCLVKGFYPSDIAVEWESNGQPENNYKTT |
| | PPVLDSDGSFFLYSKLTVDKSRWQQGNVFSCSVMHEALHNHYTQKSLSLSPGK |
| | (SEQ ID NO: 788) |
| 12844B | EVQLVESGGSVVRPGGSLRLSCEASGFTFDDYGMSWVRQDPGKGLEWVSGINWNGDRTNYADSVKG |
| | RFIISRDNAKNSVYLQMNSLRAEDSALYHCARDQGLGVAATLDYWGQGTLVTVSSASTKGPSVFPL |
| | APSSKSTSGGTAALGCLVKDYFPEPVTVSWNSGALTSGVHTFPAVLQSSGLYSLSSVVTVPSSSLG |
| | TQTYICNVNHKPSNTKVDKKVEPKSCDKTHTCPPCPAPELLGGPSVFLFPPKPKDTLMISRTPEVT |
| | CVVVDVSHEDPEVKFNWYVDGVEVHNAKTKPREEQYNSTYRVVSVLTVLHQDWLNGKEYKCKVSNK |
| | ALPAPIEKTISKAKGQPREPQVYTLPPSRDELTKNQVSLTCLVKGFYPSDIAVEWESNGQPENNYK |
| | TTPPVLDSDGSFFLYSKLTVDKSRWQQGNVFSCSVMHEALHNHYTQKSLSLSPGK |
| | (SEQ ID NO: 789) |
| 12845B | EVQLVESGGGLVQPGGSLRLSCAASGFTVSNYEMNWVRQAPGKGLEWVSYISSSTSNIYYADSVKG |
| | RFTISRDNAENSLYLQMNSLRVEDTAVYYCVRDGIVVVPVGRGYYYYGLDVWGQGTTVTVSSASTK |
| | GPSVFPLAPSSKSTSGGTAALGCLVKDYFPEPVTVSWNSGALTSGVHTFPAVLQSSGLYSLSSVVT |
| | VPSSSLGTQTYICNVNHKPSNTKVDKKVEPKSCDKTHTCPPCPAPELLGGPSVFLFPPKPKDTLMI |
| | SRTPEVTCVVVDVSHEDPEVKFNWYVDGVEVHNAKTKPREEQYNSTYRVVSVLTVLHQDWLNGKEY |
| | KCKVSNKALPAPIEKTISKAKGQPREPQVYTLPPSRDELTKNQVSLTCLVKGFYPSDIAVEWESNG |
| | QPENNYKTTPPVLDSDGSFFLYSKLTVDKSRWQQGNVFSCSVMHEALHNHYTQKSLSLSPGK |
| | (SEQ ID NO: 790) |
| 12839B | QVQLVESGGGVVQPGRSLRLSCAASGFPFSNYVMYWVRQAPGKGLEWVALIFFDGKKNYHADSVKG |
| | RFTITRDNSKNMLYLQMNSLRPEDAAVYYCAKIHCPNGVCYKGYYGMDVWGQGTTVTVSSASTKGP |
| | SVFPLAPSSKSTSGGTAALGCLVKDYFPEPVTVSWNSGALTSGVHTFPAVLQSSGLYSLSSVVTVP |
| | SSSLGTQTYICNVNHKPSNTKVDKKVEPKSCDKTHTCPPCPAPELLGGPSVFLFPPKPKDTLMISR |
| | TPEVTCVVVDVSHEDPEVKFNWYVDGVEVHNAKTKPREEQYNSTYRVVSVLTVLHQDWLNGKEYKC |
| | KVSNKALPAPIEKTISKAKGQPREPQVYTLPPSRDELTKNQVSLTCLVKGFYPSDIAVEWESNGQP |
| | ENNYKTTPPVLDSDGSFFLYSKLTVDKSRWQQGNVFSCSVMHEALHNHYTQKSLSLSPGK |
| | (SEQ ID NO: 791) |
| 12841B | EVQLVESGGGLVQPGGSLRLSCAASGFTFSNYWMNWVRQAPGKGLEWVANIKEDGGKKLYVDSVKG |
| | RFTISRDNAKNSLFLQMNSLRAEDTAVYYCAREDTTLVVDYYYYGMDVWGQGTTVTVSSASTKGPS |
| | VFPLAPSSKSTSGGTAALGCLVKDYFPEPVTVSWNSGALTSGVHTFPAVLQSSGLYSLSSVVTVPS |
| | SSLGTQTYICNVNHKPSNTKVDKKVEPKSCDKTHTCPPCPAPELLGGPSVFLFPPKPKDTLMISRT |
| | PEVTCVVVDVSHEDPEVKFNWYVDGVEVHNAKTKPREEQYNSTYRVVSVLTVLHQDWLNGKEYKCK |
| | VSNKALPAPIEKTISKAKGQPREPQVYTLPPSRDELTKNQVSLTCLVKGFYPSDIAVEWESNGQPE |
| | NNYKTTPPVLDSDGSFFLYSKLTVDKSRWQQGNVFSCSVMHEALHNHYTQKSLSLSPGK |
| | (SEQ ID NO: 792) |
| 12850B | QVQLVQSGAEVKKPGSSVKVSCKASGGTFNTYAITWVRQAPGQGLEWMGGIIPISGIAEYAQKFQG |
| | RVTITTDDSSTTAYMELNSLRSEDTAVYYCASWNYALYYFYGMDVWGRGTTVTVSSASTKGPSVFP |
| | LAPSSKSTSGGTAALGCLVKDYFPEPVTVSWNSGALTSGVHTFPAVLQSSGLYSLSSVVTVPSSSL |
| | GTQTYICNVNHKPSNTKVDKKVEPKSCDKTHTCPPCPAPELLGGPSVFLFPPKPKDTLMISRTPEV |
| | TCVVVDVSHEDPEVKFNWYVDGVEVHNAKTKPREEQYNSTYRVVSVLTVLHQDWLNGKEYKCKVSN |
| | KALPAPIEKTISKAKGQPREPQVYTLPPSRDELTKNQVSLTCLVKGFYPSDIAVEWESNGQPENNY |
| | KTTPPVLDSDGSFFLYSKLTVDKSRWQQGNVFSCSVMHEALHNHYTQKSLSLSPGK |
| | (SEQ ID NO: 793) |
| 69261 | QVQLVESGGGLVKPGGSLRLSCAASGFTFSVYYMNWIRQAPGKGLEWVSYISSSGSTIYYADSVKG |
| | RFTISRDNAKNSLYLQMNSLRAEDTAVYYCGREGYSGTYSYYGMDVWGQGTTVTVSSASTKGPSVF |
| | PLAPSSKSTSGGTAALGCLVKDYFPEPVTVSWNSGALTSGVHTFPAVLQSSGLYSLSSVVTVPSSS |
| | LGTQTYICNVNHKPSNTKVDKKVEPKSCDKTHTCPPCPAPELLGGPSVFLFPPKPKDTLMISRTPE |
| | VTCVVVDVSHEDPEVKFNWYVDGVEVHNAKTKPREEQYNSTYRVVSVLTVLHQDWLNGKEYKCKVS |
| | NKALPAPIEKTISKAKGQPREPQVYTLPPSRDELTKNQVSLTCLVKGFYPSDIAVEWESNGQPENN |
| | YKTTPPVLDSDGSFFLYSKLTVDKSRWQQGNVFSCSVMHEALHNHYTQKSLSLSPGK |
| | (SEQ ID NO: 794) |
| 69263 | EVQLVESGGGLVQPGRSLRLSCAVSGFTFDDYAMHWVRQAPGKGLEWVSGISWNSGTRGYADSVKG |
| | RFTISRDNAKNSLYLQMNSLRGEDTALYYCVKDITISPNYYGMDVWGQGTTVTVSSASTKGPSVEP |
| | LAPSSKSTSGGTAALGCLVKDYFPEPVTVSWNSGALTSGVHTFPAVLQSSGLYSLSSVVTVPSSSL |
| | GTQTYICNVNHKPSNTKVDKKVEPKSCDKTHTCPPCPAPELLGGPSVFLFPPKPKDTLMISRTPEV |
| | TCVVVDVSHEDPEVKFNWYVDGVEVHNAKTKPREEQYNSTYRVVSVLTVLHQDWLNGKEYKCKVSN |
| | KALPAPIEKTISKAKGQPREPQVYTLPPSRDELTKNQVSLTCLVKGFYPSDIAVEWESNGQPENNY |
| | KTTPPVLDSDGSFFLYSKLTVDKSRWQQGNVFSCSVMHEALHNHYTQKSLSLSPGK |
| | (SEQ ID NO: 795) |

[0228] As discussed, an anti-hTfR:ASM scFv fusion protein (e.g., 31874B; 31863B; 69348; 69340; 69331; 69332; 69326; 69329; 69323; 69305; 69307; 12795B; 12798B; 12799B; 12801B; 12802B; 12808B; 12812B; 12816B; 12833B; 12834B; 12835B; 12847B; 12848B; 12843B; 12844B; 12845B; 12839B; 12841B; 12850B; 69261; or 69263) comprises an optional signal peptide, connected to an scFv (e.g., including a V_{L} and a V_{H} optionally connected by a linker), connected to an option linker, connected to an ASM. For example, the optional signal peptide can be the signal peptide from Mus musculus Ror1 (e.g., consisting of the amino acids MHRPRRRGTRPPPLALLAALLLAARGADA (SEQ ID NO: 610).

[0229] In a particular multidomain therapeutic protein, the TfR-binding delivery domain is an anti-TfR scFv. For example, the scFv can include a V_{L} and a V_{H} optionally connected by a linker.

[0230] In one example, the anti-hTfR antibody or antigen-binding fragment thereof or scFv can comprise: (i) a heavy chain variable region that comprises the HCDR1, HCDR2 and HCDR3 of a HCVR comprising the amino acid sequence set forth in SEQ ID NO: 171, 680, 181, 681, 191, 682, 201, 211, 221, 685, 231, 687, 241, 689, 251, 261, 691, 271, 281, 692, 291, 301, 311, 694, 321, 331, 696, 341, 351, 697, 361, 699, 371, 700, 381, 391, 401, 411, 421, 701, 431, 441, 451, 461, 471, 702, or 481; and/or (ii) a light chain variable region that comprises the LCDR1, LCDR2 and LCDR3 of a LCVR comprising the amino acid sequence set forth in SEQ ID NO: 176, 186, 196, 206, 683, 216, 684, 226, 686, 236, 688, 246, 690, 256, 266, 276, 286, 693, 296, 306, 316, 695, 326, 336, 346, 356, 698, 366, 376, 386, 396, 406, 416, 426, 436, 446, 456, 466, 476, 632, 486, or 703.

[0231] In another example, the anti-TfR antibody or antigen-binding fragment thereof or scFv can comprise: (1) a HCVR comprising the HCDR1, HCDR2 and HCDR3 of a HCVR that comprises the amino acid sequence set forth in SEQ ID NO: 171 or 680 (or a variant thereof); and a LCVR comprising the LCDR1, LCDR2 and LCDR3 of a LCVR that comprises the amino acid sequence set forth in SEQ ID NO: 176 (or a variant thereof); (2) a HCVR comprising the HCDR1, HCDR2 and HCDR3 of a HCVR that comprises the amino acid sequence set forth in SEQ ID NO: 181 or 681 (or a variant thereof); and a LCVR comprising the LCDR1, LCDR2 and LCDR3 of a LCVR that comprises the amino acid sequence set forth in SEQ ID NO: 186 (or a variant thereof); (3) a HCVR comprising the HCDR1, HCDR2 and HCDR3 of a HCVR that comprises the amino acid sequence set forth in SEQ ID NO: 191 or 682 (or a variant thereof); and a LCVR comprising the LCDR1, LCDR2 and LCDR3 of a LCVR that comprises the amino acid sequence set forth in SEQ ID NO: 196 (or a variant thereof); (4) a HCVR comprising the HCDR1, HCDR2 and HCDR3 of a HCVR that comprises the amino acid sequence set forth in SEQ ID NO: 201 (or a variant thereof); and a LCVR comprising the LCDR1, LCDR2 and LCDR3 of a LCVR that comprises the amino acid sequence set forth in SEQ ID NO: 206 or 683 (or a variant thereof); (5) a HCVR comprising the HCDR1, HCDR2 and HCDR3 of a HCVR that comprises the amino acid sequence set forth in SEQ ID NO: 211 (or a variant thereof); and a LCVR comprising the LCDR1, LCDR2 and LCDR3 of a LCVR that comprises the amino acid sequence set forth in SEQ ID NO: 216 or 684 (or a variant thereof); (6) a HCVR comprising the HCDR1, HCDR2 and HCDR3 of a HCVR that comprises the amino acid sequence set forth in SEQ ID NO: 221 or 685 (or a variant thereof); and a LCVR comprising the LCDR1, LCDR2 and LCDR3 of a LCVR that comprises the amino acid sequence set forth in SEQ ID NO: 226 or 686 (or a variant thereof); (7) a HCVR comprising the HCDR1, HCDR2 and HCDR3 of a HCVR that comprises the amino acid sequence set forth in SEQ ID NO: 231 or 687 (or a variant thereof); and a LCVR comprising the LCDR1, LCDR2 and LCDR3 of a LCVR that comprises the amino acid sequence set forth in SEQ ID NO: 236 or 688 (or a variant thereof); (8) a HCVR comprising the HCDR1, HCDR2 and HCDR3 of a HCVR that comprises the amino acid sequence set forth in SEQ ID NO: 241 or 689 (or a variant thereof); and a LCVR comprising the LCDR1, LCDR2 and LCDR3 of a LCVR that comprises the amino acid sequence set forth in SEQ ID NO: 246 or 690 (or a variant thereof); (9) a HCVR comprising the HCDR1, HCDR2 and HCDR3 of a HCVR that comprises the amino acid sequence set forth in SEQ ID NO: 251 (or a variant thereof); and a LCVR comprising the LCDR1, LCDR2 and LCDR3 of a LCVR that comprises the amino acid sequence set forth in SEQ ID NO: 256 (or a variant thereof); (10) a HCVR comprising the HCDR1, HCDR2 and HCDR3 of a HCVR that comprises the amino acid sequence set forth in SEQ ID NO: 261 or 691 (or a variant thereof); and a LCVR comprising the LCDR1, LCDR2 and LCDR3 of a LCVR that comprises the amino acid sequence set forth in SEQ ID NO: 266 (or a variant thereof); (11) a HCVR comprising the HCDR1, HCDR2 and HCDR3 of a HCVR that comprises the amino acid sequence set forth in SEQ ID NO: 271 (or a variant thereof); and a LCVR comprising the LCDR1, LCDR2 and LCDR3 of a LCVR that comprises the amino acid sequence set forth in SEQ ID NO: 276 (or a variant thereof); (12) a HCVR comprising the HCDR1, HCDR2 and HCDR3 of a HCVR that comprises the amino acid sequence set forth in SEQ ID NO: 281 or 692 (or a variant thereof); and a LCVR comprising the LCDR1, LCDR2 and LCDR3 of a LCVR that comprises the amino acid sequence set forth in SEQ ID NO: 286 or 693 (or a variant thereof); (13) a HCVR comprising the HCDR1, HCDR2 and HCDR3 of a HCVR that comprises the amino acid sequence set forth in SEQ ID NO: 291 (or a variant thereof); and a LCVR comprising the LCDR1, LCDR2 and LCDR3 of a LCVR that comprises the amino acid sequence set forth in SEQ ID NO: 296 (or a variant thereof); (14) a HCVR comprising the HCDR1, HCDR2 and HCDR3 of a HCVR that comprises the amino acid sequence set forth in SEQ ID NO: 301 (or a variant thereof); and a LCVR comprising the LCDR1, LCDR2 and LCDR3 of a LCVR that comprises the amino acid sequence set forth in SEQ ID NO: 306 (or a variant thereof); (15) a HCVR comprising the HCDR1, HCDR2 and HCDR3 of a HCVR that comprises the amino acid sequence set forth in SEQ ID NO: 311 or 694 (or a variant thereof); and a LCVR comprising the LCDR1, LCDR2 and LCDR3 of a LCVR that comprises the amino acid sequence set forth in SEQ ID NO: 316 or 695 (or a variant thereof); (16) a HCVR comprising the HCDR1, HCDR2 and HCDR3 of a HCVR that comprises the amino acid sequence set forth in SEQ ID NO: 321 (or a variant thereof); and a LCVR comprising the LCDR1, LCDR2 and LCDR3 of a LCVR that comprises the amino acid sequence set forth in SEQ ID NO: 326 (or a variant thereof); (17) a HCVR comprising the HCDR1, HCDR2 and HCDR3 of a HCVR that comprises the amino acid sequence set forth in SEQ ID NO: 331 or 696 (or a variant thereof); and a LCVR comprising the LCDR1, LCDR2 and LCDR3 of a LCVR that comprises the amino acid sequence set forth in SEQ ID NO: 336 (or a variant thereof); (18) a HCVR comprising the HCDR1, HCDR2 and HCDR3 of a HCVR that comprises the amino acid sequence set forth in SEQ ID NO: 341 (or a variant thereof); and a LCVR comprising the LCDR1, LCDR2 and LCDR3 of a LCVR that comprises the amino acid sequence set forth in SEQ ID NO: 346 (or a variant thereof); (19) a HCVR comprising the HCDR1, HCDR2 and HCDR3 of a HCVR that comprises the amino acid sequence set forth in SEQ ID NO: 351 or 697 (or a variant thereof); and a LCVR comprising the LCDR1, LCDR2 and LCDR3 of a LCVR that comprises the amino acid sequence set forth in SEQ ID NO: 356 or 698 (or a variant thereof); (20) a HCVR comprising the HCDR1, HCDR2 and HCDR3 of a HCVR that comprises the amino acid sequence set forth in SEQ ID NO: 361 or 699 (or a variant thereof); and a LCVR comprising the LCDR1, LCDR2 and LCDR3 of a LCVR that comprises the amino acid sequence set forth in SEQ ID NO: 366 (or a variant thereof); (21) a HCVR comprising the HCDR1, HCDR2 and HCDR3 of a HCVR that comprises the amino acid sequence set forth in SEQ ID NO: 371 or 700 (or a variant thereof); and a LCVR comprising the LCDR1, LCDR2 and LCDR3 of a LCVR that comprises the amino acid sequence set forth in SEQ ID NO: 376 (or a variant thereof); (22) a HCVR comprising the HCDR1, HCDR2 and HCDR3 of a HCVR that comprises the amino acid sequence set forth in SEQ ID NO: 381 (or a variant thereof); and a LCVR comprising the LCDR1, LCDR2 and LCDR3 of a LCVR that comprises the amino acid sequence set forth in SEQ ID NO: 386 (or a variant thereof); (23) a HCVR comprising the HCDR1, HCDR2 and HCDR3 of a HCVR that comprises the amino acid sequence set forth in SEQ ID NO: 391 (or a variant thereof); and a LCVR comprising the LCDR1, LCDR2 and LCDR3 of a LCVR that comprises the amino acid sequence set forth in SEQ ID NO: 396 (or a variant thereof); (24) a HCVR comprising the HCDR1, HCDR2 and HCDR3 of a HCVR that comprises the amino acid sequence set forth in SEQ ID NO: 401 (or a variant thereof); and a LCVR comprising the LCDR1, LCDR2 and LCDR3 of a LCVR that comprises the amino acid sequence set forth in SEQ ID NO: 406 (or a variant thereof); (25) a HCVR comprising the HCDR1, HCDR2 and HCDR3 of a HCVR that comprises the amino acid sequence set forth in SEQ ID NO: 411 (or a variant thereof); and a LCVR comprising the LCDR1, LCDR2 and LCDR3 of a LCVR that comprises the amino acid sequence set forth in SEQ ID NO: 416 (or a variant thereof); (26) a HCVR comprising the HCDR1, HCDR2 and HCDR3 of a HCVR that comprises the amino acid sequence set forth in SEQ ID NO: 421 or 701 (or a variant thereof); and a LCVR comprising the LCDR1, LCDR2 and LCDR3 of a LCVR that comprises the amino acid sequence set forth in SEQ ID NO: 426 (or a variant thereof); (27) a HCVR comprising the HCDR1, HCDR2 and HCDR3 of a HCVR that comprises the amino acid sequence set forth in SEQ ID NO: 431 (or a variant thereof); and a LCVR comprising the LCDR1, LCDR2 and LCDR3 of a LCVR that comprises the amino acid sequence set forth in SEQ ID NO: 436 (or a variant thereof); (28) a HCVR comprising the HCDR1, HCDR2 and HCDR3 of a HCVR that comprises the amino acid sequence set forth in SEQ ID NO: 441 (or a variant thereof); and a LCVR comprising the LCDR1, LCDR2 and LCDR3 of a LCVR that comprises the amino acid sequence set forth in SEQ ID NO: 446 (or a variant thereof); (29) a HCVR comprising the HCDR1, HCDR2 and HCDR3 of a HCVR that comprises the amino acid sequence set forth in SEQ ID NO: 451 (or a variant thereof); and a LCVR comprising the LCDR1, LCDR2 and LCDR3 of a LCVR that comprises the amino acid sequence set forth in SEQ ID NO: 456 (or a variant thereof); (30) a HCVR comprising the HCDR1, HCDR2 and HCDR3 of a HCVR that comprises the amino acid sequence set forth in SEQ ID NO: 461 (or a variant thereof); and a LCVR comprising the LCDR1, LCDR2 and LCDR3 of a LCVR that comprises the amino acid sequence set forth in SEQ ID NO: 466 (or a variant thereof); (31) a HCVR comprising the HCDR1, HCDR2 and HCDR3 of a HCVR that comprises the amino acid sequence set forth in SEQ ID NO: 471 or 702 (or a variant thereof); and a LCVR comprising the LCDR1, LCDR2 and LCDR3 of a LCVR that comprises the amino acid sequence set forth in SEQ ID NO: 476 or 632 (or a variant thereof); or (32) a HCVR comprising the HCDR1, HCDR2 and HCDR3 of a HCVR that comprises the amino acid sequence set forth in SEQ ID NO: 481 (or a variant thereof); and a LCVR comprising the LCDR1, LCDR2 and LCDR3 of a LCVR that comprises the amino acid sequence set forth in SEQ ID NO: 486 or 703 (or a variant thereof). A variant refers to a polypeptide comprising an amino acid sequence that is at least about 70-99.9% (e.g., 70, 72, 74, 75, 76, 79, 80, 81, 82, 83, 84, 85, 86, 87, 88, 89, 90, 91, 92, 93, 94, 95, 96, 97, 98, 99, 99.5, 99.9%) identical or similar to a referenced amino acid sequence that is set forth herein.

[0232] In another example, the anti-TfR antibody or antigen-binding fragment thereof or scFv can comprise: (23) a HCVR comprising the HCDR1, HCDR2 and HCDR3 of a HCVR that comprises the amino acid sequence set forth in SEQ ID NO: 391 (or a variant thereof); and a LCVR comprising the LCDR1, LCDR2 and LCDR3 of a LCVR that comprises the amino acid sequence set forth in SEQ ID NO: 396 (or a variant thereof); or (25) a HCVR comprising the HCDR1, HCDR2 and HCDR3 of a HCVR that comprises the amino acid sequence set forth in SEQ ID NO: 411 (or a variant thereof); and a LCVR comprising the LCDR1, LCDR2 and LCDR3 of a LCVR that comprises the amino acid sequence set forth in SEQ ID NO: 416 (or a variant thereof). In another example, the anti-TfR antibody or antigen-binding fragment thereof or scFv can comprise a HCVR comprising the HCDR1, HCDR2 and HCDR3 of a HCVR that comprises the amino acid sequence set forth in SEQ ID NO: 391 (or a variant thereof); and a LCVR comprising the LCDR1, LCDR2 and LCDR3 of a LCVR that comprises the amino acid sequence set forth in SEQ ID NO: 396 (or a variant thereof). In another example, the anti-TfR antibody or antigen-binding fragment thereof or scFv can comprise a HCVR comprising the HCDR1, HCDR2 and HCDR3 of a HCVR that comprises the amino acid sequence set forth in SEQ ID NO: 411 (or a variant thereof); and a LCVR comprising the LCDR1, LCDR2 and LCDR3 of a LCVR that comprises the amino acid sequence set forth in SEQ ID NO: 416 (or a variant thereof).

[0233] In another example, the anti-TfR antibody or antigen-binding fragment thereof or scFv can comprise: (a) a HCVR that comprises: an HCDR1 comprising the amino acid sequence set forth in SEQ ID NO: 172 (or a variant thereof), an HCDR2 comprising the amino acid sequence set forth in SEQ ID NO: 173 (or a variant thereof), and an HCDR3 comprising the amino acid sequence set forth in SEQ ID NO: 174 (or a variant thereof); and a LCVR that comprises: an LCDR1 comprising the amino acid sequence set forth in SEQ ID NO: 177 (or a variant thereof), an LCDR2 comprising the amino acid sequence set forth in SEQ ID NO: 178 (or a variant thereof), and an LCDR3 comprising the amino acid sequence set forth in SEQ ID NO: 179 (or a variant thereof); (b) a HCVR that comprises: an HCDR1 comprising the amino acid sequence set forth in SEQ ID NO: 182 (or a variant thereof), an HCDR2 comprising the amino acid sequence set forth in SEQ ID NO: 183 (or a variant thereof), and an HCDR3 comprising the amino acid sequence set forth in SEQ ID NO: 184 (or a variant thereof); and a LCVR that comprises: an LCDR1 comprising the amino acid sequence set forth in SEQ ID NO: 187 (or a variant thereof), an LCDR2 comprising the amino acid sequence set forth in SEQ ID NO: 188 (or a variant thereof), and an LCDR3 comprising the amino acid sequence set forth in SEQ ID NO: 189 (or a variant thereof); (c) a HCVR that comprises: an HCDR1 comprising the amino acid sequence set forth in SEQ ID NO: 192 (or a variant thereof), an HCDR2 comprising the amino acid sequence set forth in SEQ ID NO: 193 (or a variant thereof), and an HCDR3 comprising the amino acid sequence set forth in SEQ ID NO: 194 (or a variant thereof); and a LCVR that comprises: an LCDR1 comprising the amino acid sequence set forth in SEQ ID NO: 197 (or a variant thereof), an LCDR2 comprising the amino acid sequence set forth in SEQ ID NO: 198 (or a variant thereof), and an LCDR3 comprising the amino acid sequence set forth in SEQ ID NO: 199 (or a variant thereof); (d) a HCVR that comprises: an HCDR1 comprising the amino acid sequence set forth in SEQ ID NO: 202 (or a variant thereof), an HCDR2 comprising the amino acid sequence set forth in SEQ ID NO: 203 (or a variant thereof), and an HCDR3 comprising the amino acid sequence set forth in SEQ ID NO: 204 (or a variant thereof); and a LCVR that comprises: an LCDR1 comprising the amino acid sequence set forth in SEQ ID NO: 207 (or a variant thereof), an LCDR2 comprising the amino acid sequence set forth in SEQ ID NO: 208 (or a variant thereof), and an LCDR3 comprising the amino acid sequence set forth in SEQ ID NO: 209 (or a variant thereof); (e) a HCVR that comprises: an HCDR1 comprising the amino acid sequence set forth in SEQ ID NO: 212 (or a variant thereof), an HCDR2 comprising the amino acid sequence set forth in SEQ ID NO: 213 (or a variant thereof), and an HCDR3 comprising the amino acid sequence set forth in SEQ ID NO: 214 (or a variant thereof); and a LCVR that comprises: an LCDR1 comprising the amino acid sequence set forth in SEQ ID NO: 217 (or a variant thereof), an LCDR2 comprising the amino acid sequence set forth in SEQ ID NO: 218 (or a variant thereof), and an LCDR3 comprising the amino acid sequence set forth in SEQ ID NO: 219 (or a variant thereof); (f) a HCVR that comprises: an HCDR1 comprising the amino acid sequence set forth in SEQ ID NO: 222 (or a variant thereof), an HCDR2 comprising the amino acid sequence set forth in SEQ ID NO: 223 (or a variant thereof), and an HCDR3 comprising the amino acid sequence set forth in SEQ ID NO: 224 (or a variant thereof); and a LCVR that comprises: an LCDR1 comprising the amino acid sequence set forth in SEQ ID NO: 227 (or a variant thereof), an LCDR2 comprising the amino acid sequence set forth in SEQ ID NO: 228 (or a variant thereof), and an LCDR3 comprising the amino acid sequence set forth in SEQ ID NO: 229 (or a variant thereof); (g) a HCVR that comprises: an HCDR1 comprising the amino acid sequence set forth in SEQ ID NO: 232 (or a variant thereof), an HCDR2 comprising the amino acid sequence set forth in SEQ ID NO: 233 (or a variant thereof), and an HCDR3 comprising the amino acid sequence set forth in SEQ ID NO: 234 (or a variant thereof); and a LCVR that comprises: an LCDR1 comprising the amino acid sequence set forth in SEQ ID NO: 237 (or a variant thereof), an LCDR2 comprising the amino acid sequence set forth in SEQ ID NO: 238 (or a variant thereof), and an LCDR3 comprising the amino acid sequence set forth in SEQ ID NO: 239 (or a variant thereof); (h) a HCVR that comprises: an HCDR1 comprising the amino acid sequence set forth in SEQ ID NO: 242 (or a variant thereof), an HCDR2 comprising the amino acid sequence set forth in SEQ ID NO: 243 (or a variant thereof), and an HCDR3 comprising the amino acid sequence set forth in SEQ ID NO: 244 (or a variant thereof); and a LCVR that comprises: an LCDR1 comprising the amino acid sequence set forth in SEQ ID NO: 247 (or a variant thereof), an LCDR2 comprising the amino acid sequence set forth in SEQ ID NO: 248 (or a variant thereof), and an LCDR3 comprising the amino acid sequence set forth in SEQ ID NO: 249 (or a variant thereof); (i) a HCVR that comprises: an HCDR1 comprising the amino acid sequence set forth in SEQ ID NO: 252 (or a variant thereof), an HCDR2 comprising the amino acid sequence set forth in SEQ ID NO: 253 (or a variant thereof), and an HCDR3 comprising the amino acid sequence set forth in SEQ ID NO: 254 (or a variant thereof); and a LCVR that comprises: an LCDR1 comprising the amino acid sequence set forth in SEQ ID NO: 257 (or a variant thereof), an LCDR2 comprising the amino acid sequence set forth in SEQ ID NO: 258 (or a variant thereof), and an LCDR3 comprising the amino acid sequence set forth in SEQ ID NO: 259 (or a variant thereof); (j) a HCVR that comprises: an HCDR1 comprising the amino acid sequence set forth in SEQ ID NO: 262 (or a variant thereof), an HCDR2 comprising the amino acid sequence set forth in SEQ ID NO: 263 (or a variant thereof), and an HCDR3 comprising the amino acid sequence set forth in SEQ ID NO: 264 (or a variant thereof); and a LCVR that comprises: an LCDR1 comprising the amino acid sequence set forth in SEQ ID NO: 267 (or a variant thereof), an LCDR2 comprising the amino acid sequence set forth in SEQ ID NO: 268 (or a variant thereof), and an LCDR3 comprising the amino acid sequence set forth in SEQ ID NO: 269 (or a variant thereof); (k) a HCVR that comprises: an HCDR1 comprising the amino acid sequence set forth in SEQ ID NO: 272 (or a variant thereof), an HCDR2 comprising the amino acid sequence set forth in SEQ ID NO: 273 (or a variant thereof), and an HCDR3 comprising the amino acid sequence set forth in SEQ ID NO: 274 (or a variant thereof); and a LCVR that comprises: an LCDR1 comprising the amino acid sequence set forth in SEQ ID NO: 277 (or a variant thereof), an LCDR2 comprising the amino acid sequence set forth in SEQ ID NO: 278 (or a variant thereof), and an LCDR3 comprising the amino acid sequence set forth in SEQ ID NO: 279 (or a variant thereof); (1) a HCVR that comprises: an HCDR1 comprising the amino acid sequence set forth in SEQ ID NO: 282 (or a variant thereof), an HCDR2 comprising the amino acid sequence set forth in SEQ ID NO: 283 (or a variant thereof), and an HCDR3 comprising the amino acid sequence set forth in SEQ ID NO: 284 (or a variant thereof); and a LCVR that comprises: an LCDR1 comprising the amino acid sequence set forth in SEQ ID NO: 287 (or a variant thereof), an LCDR2 comprising the amino acid sequence set forth in SEQ ID NO: 288 (or a variant thereof), and an LCDR3 comprising the amino acid sequence set forth in SEQ ID NO: 289 (or a variant thereof); (m) a HCVR that comprises: an HCDR1 comprising the amino acid sequence set forth in SEQ ID NO: 292 (or a variant thereof), an HCDR2 comprising the amino acid sequence set forth in SEQ ID NO: 293 (or a variant thereof), and an HCDR3 comprising the amino acid sequence set forth in SEQ ID NO: 294 (or a variant thereof); and a LCVR that comprises: an LCDR1 comprising the amino acid sequence set forth in SEQ ID NO: 297 (or a variant thereof), an LCDR2 comprising the amino acid sequence set forth in SEQ ID NO: 298 (or a variant thereof), and an LCDR3 comprising the amino acid sequence set forth in SEQ ID NO: 299 (or a variant thereof); (n) a HCVR that comprises: an HCDR1 comprising the amino acid sequence set forth in SEQ ID NO: 302 (or a variant thereof), an HCDR2 comprising the amino acid sequence set forth in SEQ ID NO: 303 (or a variant thereof), and an HCDR3 comprising the amino acid sequence set forth in SEQ ID NO: 304 (or a variant thereof); and a LCVR that comprises: an LCDR1 comprising the amino acid sequence set forth in SEQ ID NO: 307 (or a variant thereof), an LCDR2 comprising the amino acid sequence set forth in SEQ ID NO: 308 (or a variant thereof), and an LCDR3 comprising the amino acid sequence set forth in SEQ ID NO: 309 (or a variant thereof); (o) a HCVR that comprises: an HCDR1 comprising the amino acid sequence set forth in SEQ ID NO: 312 (or a variant thereof), an HCDR2 comprising the amino acid sequence set forth in SEQ ID NO: 313 (or a variant thereof), and an HCDR3 comprising the amino acid sequence set forth in SEQ ID NO: 314 (or a variant thereof); and a LCVR that comprises: an LCDR1 comprising the amino acid sequence set forth in SEQ ID NO: 317 (or a variant thereof), an LCDR2 comprising the amino acid sequence set forth in SEQ ID NO: 318 (or a variant thereof), and an LCDR3 comprising the amino acid sequence set forth in SEQ ID NO: 319 (or a variant thereof); (p) a HCVR that comprises: an HCDR1 comprising the amino acid sequence set forth in SEQ ID NO: 322 (or a variant thereof), an HCDR2 comprising the amino acid sequence set forth in SEQ ID NO: 323 (or a variant thereof), and an HCDR3 comprising the amino acid sequence set forth in SEQ ID NO: 324 (or a variant thereof); and a LCVR that comprises: an LCDR1 comprising the amino acid sequence set forth in SEQ ID NO: 327 (or a variant thereof), an LCDR2 comprising the amino acid sequence set forth in SEQ ID NO: 328 (or a variant thereof), and an LCDR3 comprising the amino acid sequence set forth in SEQ ID NO: 329 (or a variant thereof); (q) a HCVR that comprises: an HCDR1 comprising the amino acid sequence set forth in SEQ ID NO: 332 (or a variant thereof), an HCDR2 comprising the amino acid sequence set forth in SEQ ID NO: 333 (or a variant thereof), and an HCDR3 comprising the amino acid sequence set forth in SEQ ID NO: 334 (or a variant thereof); and a LCVR that comprises: an LCDR1 comprising the amino acid sequence set forth in SEQ ID NO: 337 (or a variant thereof), an LCDR2 comprising the amino acid sequence set forth in SEQ ID NO: 338 (or a variant thereof), and an LCDR3 comprising the amino acid sequence set forth in SEQ ID NO: 339 (or a variant thereof); (r) a HCVR that comprises: an HCDR1 comprising the amino acid sequence set forth in SEQ ID NO: 342 (or a variant thereof), an HCDR2 comprising the amino acid sequence set forth in SEQ ID NO: 343 (or a variant thereof), and an HCDR3 comprising the amino acid sequence set forth in SEQ ID NO: 344 (or a variant thereof); and a LCVR that comprises: an LCDR1 comprising the amino acid sequence set forth in SEQ ID NO: 347 (or a variant thereof), an LCDR2 comprising the amino acid sequence set forth in SEQ ID NO: 348 (or a variant thereof), and an LCDR3 comprising the amino acid sequence set forth in SEQ ID NO: 349 (or a variant thereof); (s) a HCVR that comprises: an HCDR1 comprising the amino acid sequence set forth in SEQ ID NO: 352 (or a variant thereof), an HCDR2 comprising the amino acid sequence set forth in SEQ ID NO: 353 (or a variant thereof), and an HCDR3 comprising the amino acid sequence set forth in SEQ ID NO: 354 (or a variant thereof); and a LCVR that comprises: an LCDR1 comprising the amino acid sequence set forth in SEQ ID NO: 357 (or a variant thereof), an LCDR2 comprising the amino acid sequence set forth in SEQ ID NO: 358 (or a variant thereof), and an LCDR3 comprising the amino acid sequence set forth in SEQ ID NO: 359 (or a variant thereof); (t) a HCVR that comprises: an HCDR1 comprising the amino acid sequence set forth in SEQ ID NO: 362 (or a variant thereof), an HCDR2 comprising the amino acid sequence set forth in SEQ ID NO: 363 (or a variant thereof), and an HCDR3 comprising the amino acid sequence set forth in SEQ ID NO: 364 (or a variant thereof); and a LCVR that comprises: an LCDR1 comprising the amino acid sequence set forth in SEQ ID NO: 367 (or a variant thereof), an LCDR2 comprising the amino acid sequence set forth in SEQ ID NO: 368 (or a variant thereof), and an LCDR3 comprising the amino acid sequence set forth in SEQ ID NO: 369 (or a variant thereof); (u) a HCVR that comprises: an HCDR1 comprising the amino acid sequence set forth in SEQ ID NO: 372 (or a variant thereof), an HCDR2 comprising the amino acid sequence set forth in SEQ ID NO: 373 (or a variant thereof), and an HCDR3 comprising the amino acid sequence set forth in SEQ ID NO: 374 (or a variant thereof); and a LCVR that comprises: an LCDR1 comprising the amino acid sequence set forth in SEQ ID NO: 377 (or a variant thereof), an LCDR2 comprising the amino acid sequence set forth in SEQ ID NO: 378 (or a variant thereof), and an LCDR3 comprising the amino acid sequence set forth in SEQ ID NO: 379 (or a variant thereof); (v) a HCVR that comprises: an HCDR1 comprising the amino acid sequence set forth in SEQ ID NO: 382 (or a variant thereof), an HCDR2 comprising the amino acid sequence set forth in SEQ ID NO: 383 (or a variant thereof), and an HCDR3 comprising the amino acid sequence set forth in SEQ ID NO: 384 (or a variant thereof); and a LCVR that comprises: an LCDR1 comprising the amino acid sequence set forth in SEQ ID NO: 387 (or a variant thereof), an LCDR2 comprising the amino acid sequence set forth in SEQ ID NO: 388 (or a variant thereof), and an LCDR3 comprising the amino acid sequence set forth in SEQ ID NO: 389 (or a variant thereof); (w) a HCVR that comprises: an HCDR1 comprising the amino acid sequence set forth in SEQ ID NO: 392 (or a variant thereof), an HCDR2 comprising the amino acid sequence set forth in SEQ ID NO: 393 (or a variant thereof), and an HCDR3 comprising the amino acid sequence set forth in SEQ ID NO: 394 (or a variant thereof); and a LCVR that comprises: an LCDR1 comprising the amino acid sequence set forth in SEQ ID NO: 397 (or a variant thereof), an LCDR2 comprising the amino acid sequence set forth in SEQ ID NO: 398 (or a variant thereof), and an LCDR3 comprising the amino acid sequence set forth in SEQ ID NO: 399 (or a variant thereof); (x) a HCVR that comprises: an HCDR1 comprising the amino acid sequence set forth in SEQ ID NO: 402 (or a variant thereof), an HCDR2 comprising the amino acid sequence set forth in SEQ ID NO: 403 (or a variant thereof), and an HCDR3 comprising the amino acid sequence set forth in SEQ ID NO: 404 (or a variant thereof); and a LCVR that comprises: an LCDR1 comprising the amino acid sequence set forth in SEQ ID NO: 407 (or a variant thereof), an LCDR2 comprising the amino acid sequence set forth in SEQ ID NO: 408 (or a variant thereof), and an LCDR3 comprising the amino acid sequence set forth in SEQ ID NO: 409 (or a variant thereof); (y) a HCVR that comprises: an HCDR1 comprising the amino acid sequence set forth in SEQ ID NO: 412 (or a variant thereof), an HCDR2 comprising the amino acid sequence set forth in SEQ ID NO: 413 (or a variant thereof), and an HCDR3 comprising the amino acid sequence set forth in SEQ ID NO: 414 (or a variant thereof); and a LCVR that comprises: an LCDR1 comprising the amino acid sequence set forth in SEQ ID NO: 417 (or a variant thereof), an LCDR2 comprising the amino acid sequence set forth in SEQ ID NO: 418 (or a variant thereof), and an LCDR3 comprising the amino acid sequence set forth in SEQ ID NO: 419 (or a variant thereof); (z) a HCVR that comprises: an HCDR1 comprising the amino acid sequence set forth in SEQ ID NO: 422 (or a variant thereof), an HCDR2 comprising the amino acid sequence set forth in SEQ ID NO: 423 (or a variant thereof), and an HCDR3 comprising the amino acid sequence set forth in SEQ ID NO: 424 (or a variant thereof); and a LCVR that comprises: an LCDR1 comprising the amino acid sequence set forth in SEQ ID NO: 427 (or a variant thereof), an LCDR2 comprising the amino acid sequence set forth in SEQ ID NO: 428 (or a variant thereof), and an LCDR3 comprising the amino acid sequence set forth in SEQ ID NO: 429 (or a variant thereof); (aa) a HCVR that comprises: an HCDR1 comprising the amino acid sequence set forth in SEQ ID NO: 432 (or a variant thereof), an HCDR2 comprising the amino acid sequence set forth in SEQ ID NO: 433 (or a variant thereof), and an HCDR3 comprising the amino acid sequence set forth in SEQ ID NO: 434 (or a variant thereof); and a LCVR that comprises: an LCDR1 comprising the amino acid sequence set forth in SEQ ID NO: 437 (or a variant thereof), an LCDR2 comprising the amino acid sequence set forth in SEQ ID NO: 438 (or a variant thereof), and an LCDR3 comprising the amino acid sequence set forth in SEQ ID NO: 439 (or a variant thereof); (ab) a HCVR that comprises: an HCDR1 comprising the amino acid sequence set forth in SEQ ID NO: 442 (or a variant thereof), an HCDR2 comprising the amino acid sequence set forth in SEQ ID NO: 443 (or a variant thereof), and an HCDR3 comprising the amino acid sequence set forth in SEQ ID NO: 444 (or a variant thereof); and a LCVR that comprises: an LCDR1 comprising the amino acid sequence set forth in SEQ ID NO: 447 (or a variant thereof), an LCDR2 comprising the amino acid sequence set forth in SEQ ID NO: 448 (or a variant thereof), and an LCDR3 comprising the amino acid sequence set forth in SEQ ID NO: 449 (or a variant thereof); (ac) a HCVR that comprises: an HCDR1 comprising the amino acid sequence set forth in SEQ ID NO: 452 (or a variant thereof), an HCDR2 comprising the amino acid sequence set forth in SEQ ID NO: 453 (or a variant thereof), and an HCDR3 comprising the amino acid sequence set forth in SEQ ID NO: 454 (or a variant thereof); and a LCVR that comprises: an LCDR1 comprising the amino acid sequence set forth in SEQ ID NO: 457 (or a variant thereof), an LCDR2 comprising the amino acid sequence set forth in SEQ ID NO: 458 (or a variant thereof), and an LCDR3 comprising the amino acid sequence set forth in SEQ ID NO: 459 (or a variant thereof); (ad) a HCVR that comprises: an HCDR1 comprising the amino acid sequence set forth in SEQ ID NO: 462 (or a variant thereof), an HCDR2 comprising the amino acid sequence set forth in SEQ ID NO: 463 (or a variant thereof), and an HCDR3 comprising the amino acid sequence set forth in SEQ ID NO: 464 (or a variant thereof); and a LCVR that comprises: an LCDR1 comprising the amino acid sequence set forth in SEQ ID NO: 467 (or a variant thereof), an LCDR2 comprising the amino acid sequence set forth in SEQ ID NO: 468 (or a variant thereof), and an LCDR3 comprising the amino acid sequence set forth in SEQ ID NO: 469 (or a variant thereof); (ae) a HCVR that comprises: an HCDR1 comprising the amino acid sequence set forth in SEQ ID NO: 472 (or a variant thereof), an HCDR2 comprising the amino acid sequence set forth in SEQ ID NO: 473 (or a variant thereof), and an HCDR3 comprising the amino acid sequence set forth in SEQ ID NO: 474 (or a variant thereof); and a LCVR that comprises: an LCDR1 comprising the amino acid sequence set forth in SEQ ID NO: 477 (or a variant thereof), an LCDR2 comprising the amino acid sequence set forth in SEQ ID NO: 478 (or a variant thereof), and an LCDR3 comprising the amino acid sequence set forth in SEQ ID NO: 479 (or a variant thereof); and/or (af) a HCVR that comprises: an HCDR1 comprising the amino acid sequence set forth in SEQ ID NO: 482 (or a variant thereof), an HCDR2 comprising the amino acid sequence set forth in SEQ ID NO: 483 (or a variant thereof), and an HCDR3 comprising the amino acid sequence set forth in SEQ ID NO: 484 (or a variant thereof); and a LCVR that comprises: an LCDR1 comprising the amino acid sequence set forth in SEQ ID NO: 487 (or a variant thereof), an LCDR2 comprising the amino acid sequence set forth in SEQ ID NO: 488 (or a variant thereof), and an LCDR3 comprising the amino acid sequence set forth in SEQ ID NO: 489 (or a variant thereof). A variant refers to a polypeptide comprising an amino acid sequence that is at least about 70-99.9% (e.g., 70, 72, 74, 75, 76, 79, 80, 81, 82, 83, 84, 85, 86, 87, 88, 89, 90, 91, 92, 93, 94, 95, 96, 97, 98, 99, 99.5, 99.9%) identical or similar to a referenced amino acid sequence that is set forth herein.

[0234] In another example, the anti-TfR antibody or antigen-binding fragment thereof or scFv can comprise: (w) a HCVR that comprises: an HCDR1 comprising the amino acid sequence set forth in SEQ ID NO: 392 (or a variant thereof), an HCDR2 comprising the amino acid sequence set forth in SEQ ID NO: 393 (or a variant thereof), and an HCDR3 comprising the amino acid sequence set forth in SEQ ID NO: 394 (or a variant thereof); and a LCVR that comprises: an LCDR1 comprising the amino acid sequence set forth in SEQ ID NO: 397 (or a variant thereof), an LCDR2 comprising the amino acid sequence set forth in SEQ ID NO: 398 (or a variant thereof), and an LCDR3 comprising the amino acid sequence set forth in SEQ ID NO: 399 (or a variant thereof); or (y) a HCVR that comprises: an HCDR1 comprising the amino acid sequence set forth in SEQ ID NO: 412 (or a variant thereof), an HCDR2 comprising the amino acid sequence set forth in SEQ ID NO: 413 (or a variant thereof), and an HCDR3 comprising the amino acid sequence set forth in SEQ ID NO: 414 (or a variant thereof); and a LCVR that comprises: an LCDR1 comprising the amino acid sequence set forth in SEQ ID NO: 417 (or a variant thereof), an LCDR2 comprising the amino acid sequence set forth in SEQ ID NO: 418 (or a variant thereof), and an LCDR3 comprising the amino acid sequence set forth in SEQ ID NO: 419 (or a variant thereof). In another example, the anti-TfR antibody or antigen-binding fragment thereof or scFv can comprise a HCVR that comprises: an HCDR1 comprising the amino acid sequence set forth in SEQ ID NO: 392 (or a variant thereof), an HCDR2 comprising the amino acid sequence set forth in SEQ ID NO: 393 (or a variant thereof), and an HCDR3 comprising the amino acid sequence set forth in SEQ ID NO: 394 (or a variant thereof); and a LCVR that comprises: an LCDR1 comprising the amino acid sequence set forth in SEQ ID NO: 397 (or a variant thereof), an LCDR2 comprising the amino acid sequence set forth in SEQ ID NO: 398 (or a variant thereof), and an LCDR3 comprising the amino acid sequence set forth in SEQ ID NO: 399 (or a variant thereof). In another example, the anti-TfR antibody or antigen-binding fragment thereof or scFv can comprise a HCVR that comprises: an HCDR1 comprising the amino acid sequence set forth in SEQ ID NO: 412 (or a variant thereof), an HCDR2 comprising the amino acid sequence set forth in SEQ ID NO: 413 (or a variant thereof), and an HCDR3 comprising the amino acid sequence set forth in SEQ ID NO: 414 (or a variant thereof); and a LCVR that comprises: an LCDR1 comprising the amino acid sequence set forth in SEQ ID NO: 417 (or a variant thereof), an LCDR2 comprising the amino acid sequence set forth in SEQ ID NO: 418 (or a variant thereof), and an LCDR3 comprising the amino acid sequence set forth in SEQ ID NO: 419 (or a variant thereof).

[0235] In another example, the anti-TfR antibody or antigen-binding fragment thereof or scFv can comprise: (i) a HCVR that comprises the amino acid sequence set forth in SEQ ID NO: 171 or 680 (or a variant thereof); and a LCVR that comprises the amino acid sequence set forth in SEQ ID NO: 176 (or a variant thereof); (ii) a HCVR that comprises the amino acid sequence set forth in SEQ ID NO: 181 or 681 (or a variant thereof); and a LCVR that comprises the amino acid sequence set forth in SEQ ID NO: 186 (or a variant thereof); (iii) a HCVR that comprises the amino acid sequence set forth in SEQ ID NO: 191 or 682 (or a variant thereof); and a LCVR that comprises the amino acid sequence set forth in SEQ ID NO: 196 (or a variant thereof); (iv) a HCVR that comprises the amino acid sequence set forth in SEQ ID NO: 201 (or a variant thereof); and a LCVR that comprises the amino acid sequence set forth in SEQ ID NO: 206 or 683 (or a variant thereof); (v) a HCVR that comprises the amino acid sequence set forth in SEQ ID NO: 211 (or a variant thereof); and a LCVR that comprises the amino acid sequence set forth in SEQ ID NO: 216 or 684 (or a variant thereof); (vi) a HCVR that comprises the amino acid sequence set forth in SEQ ID NO: 221 or 685 (or a variant thereof); and a LCVR that comprises the amino acid sequence set forth in SEQ ID NO: 226 or 686 (or a variant thereof); (vii) a HCVR that comprises the amino acid sequence set forth in SEQ ID NO: 231 or 687 (or a variant thereof); and a LCVR that comprises the amino acid sequence set forth in SEQ ID NO: 236 or 688 (or a variant thereof); (viii) a HCVR that comprises the amino acid sequence set forth in SEQ ID NO: 241 or 689 (or a variant thereof); and a LCVR that comprises the amino acid sequence set forth in SEQ ID NO: 246 or 690 (or a variant thereof); (ix) a HCVR that comprises the amino acid sequence set forth in SEQ ID NO: 251 (or a variant thereof); and a LCVR that comprises the amino acid sequence set forth in SEQ ID NO: 256 (or a variant thereof); (x) a HCVR that comprises the amino acid sequence set forth in SEQ ID NO: 261 or 691 (or a variant thereof); and a LCVR that comprises the amino acid sequence set forth in SEQ ID NO: 266 (or a variant thereof); (xi) a HCVR that comprises the amino acid sequence set forth in SEQ ID NO: 271 (or a variant thereof); and a LCVR that comprises the amino acid sequence set forth in SEQ ID NO: 276 (or a variant thereof); (xii) a HCVR that comprises the amino acid sequence set forth in SEQ ID NO: 281 or 692 (or a variant thereof); and a LCVR that comprises the amino acid sequence set forth in SEQ ID NO: 286 or 693 (or a variant thereof); (xiii) a HCVR that comprises the amino acid sequence set forth in SEQ ID NO: 291 (or a variant thereof); and a LCVR that comprises the amino acid sequence set forth in SEQ ID NO: 296 (or a variant thereof); (xiv) a HCVR that comprises the amino acid sequence set forth in SEQ ID NO: 301 (or a variant thereof); and a LCVR that comprises the amino acid sequence set forth in SEQ ID NO: 306 (or a variant thereof); (xv) a HCVR that comprises the amino acid sequence set forth in SEQ ID NO: 311 or 694 (or a variant thereof); and a LCVR that comprises the amino acid sequence set forth in SEQ ID NO: 316 or 695 (or a variant thereof); (xvi) a HCVR that comprises the amino acid sequence set forth in SEQ ID NO: 321 (or a variant thereof); and a LCVR that comprises the amino acid sequence set forth in SEQ ID NO: 326 (or a variant thereof); (xvii) a HCVR that comprises the amino acid sequence set forth in SEQ ID NO: 331 or 696 (or a variant thereof); and a LCVR that comprises the amino acid sequence set forth in SEQ ID NO: 336 (or a variant thereof); (xviii) a HCVR that comprises the amino acid sequence set forth in SEQ ID NO: 341 (or a variant thereof); and a LCVR that comprises the amino acid sequence set forth in SEQ ID NO: 346 (or a variant thereof); (xix) a HCVR that comprises the amino acid sequence set forth in SEQ ID NO: 351 or 697 (or a variant thereof); and a LCVR that comprises the amino acid sequence set forth in SEQ ID NO: 356 or 698 (or a variant thereof); (xx) a HCVR that comprises the amino acid sequence set forth in SEQ ID NO: 361 or 699 (or a variant thereof); and a LCVR that comprises the amino acid sequence set forth in SEQ ID NO: 366 (or a variant thereof); (xxi) a HCVR that comprises the amino acid sequence set forth in SEQ ID NO: 371 or 700 (or a variant thereof); and a LCVR that comprises the amino acid sequence set forth in SEQ ID NO: 376 (or a variant thereof); (xxii) a HCVR that comprises the amino acid sequence set forth in SEQ ID NO: 381 (or a variant thereof); and a LCVR that comprises the amino acid sequence set forth in SEQ ID NO: 386 (or a variant thereof); (xxiii) a HCVR that comprises the amino acid sequence set forth in SEQ ID NO: 391 (or a variant thereof); and a LCVR that comprises the amino acid sequence set forth in SEQ ID NO: 396 (or a variant thereof); (xxiv) a HCVR that comprises the amino acid sequence set forth in SEQ ID NO: 401 (or a variant thereof); and a LCVR that comprises the amino acid sequence set forth in SEQ ID NO: 406 (or a variant thereof); (xxv) a HCVR that comprises the amino acid sequence set forth in SEQ ID NO: 411 (or a variant thereof); and a LCVR that comprises the amino acid sequence set forth in SEQ ID NO: 416 (or a variant thereof); (xxvi) a HCVR that comprises the amino acid sequence set forth in SEQ ID NO: 421 or 701 (or a variant thereof); and a LCVR that comprises the amino acid sequence set forth in SEQ ID NO: 426 (or a variant thereof); (xxvii) a HCVR that comprises the amino acid sequence set forth in SEQ ID NO: 431 (or a variant thereof); and a LCVR that comprises the amino acid sequence set forth in SEQ ID NO: 436 (or a variant thereof); (xxviii) a HCVR that comprises the amino acid sequence set forth in SEQ ID NO: 441 (or a variant thereof); and a LCVR that comprises the amino acid sequence set forth in SEQ ID NO: 446 (or a variant thereof); (xxix) a HCVR that comprises the amino acid sequence set forth in SEQ ID NO: 451 (or a variant thereof); and a LCVR that comprises the amino acid sequence set forth in SEQ ID NO: 456 (or a variant thereof); (xxx) a HCVR that comprises the amino acid sequence set forth in SEQ ID NO: 461 (or a variant thereof); and a LCVR that comprises the amino acid sequence set forth in SEQ ID NO: 466 (or a variant thereof); (xxxi) a HCVR that comprises the amino acid sequence set forth in SEQ ID NO: 471 or 702 (or a variant thereof); and a LCVR that comprises the amino acid sequence set forth in SEQ ID NO: 476 or 632 (or a variant thereof); and/or (xxxii) a HCVR that comprises the amino acid sequence set forth in SEQ ID NO: 481 (or a variant thereof); and a LCVR that comprises the amino acid sequence set forth in SEQ ID NO: 486 or 703 (or a variant thereof), optionally wherein the HCVR and LCVR are linked by a linker (e.g., that comprises an amino acid sequence, e.g., about 10 amino acids in length, for example, 1, 2, 3, 4, 5, 6, 7, 8, 8, or 10 repeats of Gly₄Ser (SEQ ID NO: 537). A variant refers to a polypeptide comprising an amino acid sequence that is at least about 70-99.9% (e.g., 70, 72, 74, 75, 76, 79, 80, 81, 82, 83, 84, 85, 86, 87, 88, 89, 90, 91, 92, 93, 94, 95, 96, 97, 98, 99, 99.5, 99.9%) identical or similar to a referenced amino acid sequence that is set forth herein.

[0236] In another example, the anti-TfR antibody or antigen-binding fragment thereof or scFv can comprise: (xxiii) a HCVR that comprises the amino acid sequence set forth in SEQ ID NO: 391 (or a variant thereof); and a LCVR that comprises the amino acid sequence set forth in SEQ ID NO: 396 (or a variant thereof); or (xxv) a HCVR that comprises the amino acid sequence set forth in SEQ ID NO: 411 (or a variant thereof); and a LCVR that comprises the amino acid sequence set forth in SEQ ID NO: 416 (or a variant thereof). In another example, the anti-TfR antibody or antigen-binding fragment thereof or scFv can comprise a HCVR that comprises the amino acid sequence set forth in SEQ ID NO: 391 (or a variant thereof); and a LCVR that comprises the amino acid sequence set forth in SEQ ID NO: 396 (or a variant thereof). In another example, the anti-TfR antibody or antigen-binding fragment thereof or scFv can comprise a HCVR that comprises the amino acid sequence set forth in SEQ ID NO: 411 (or a variant thereof); and a LCVR that comprises the amino acid sequence set forth in SEQ ID NO: 416 (or a variant thereof).

[0237] Examples of polynucleotides encoding anti-TfR antibodies or antigen-binding fragments thereof or scFvs are provided in Table 2 and include: (1) a polynucleotide encoding a HCVR that comprises the nucleotide sequence set forth in SEQ ID NO: 170, and a LCVR that comprises the nucleotide sequence set forth in SEQ ID NO: 175; (2) a polynucleotide encoding a HCVR that comprises the nucleotide sequence set forth in SEQ ID NO: 180, and a LCVR that comprises the nucleotide sequence set forth in SEQ ID NO: 185; (3) a polynucleotide encoding a HCVR that comprises the nucleotide sequence set forth in SEQ ID NO: 190, and a LCVR that comprises the nucleotide sequence set forth in SEQ ID NO: 195; (4) a polynucleotide encoding a HCVR that comprises the nucleotide sequence set forth in SEQ ID NO: 200, and a LCVR that comprises the nucleotide sequence set forth in SEQ ID NO: 205; (5) a polynucleotide encoding a HCVR that comprises the nucleotide sequence set forth in SEQ ID NO: 210, and a LCVR that comprises the nucleotide sequence set forth in SEQ ID NO: 215; (6) a polynucleotide encoding a HCVR that comprises the nucleotide sequence set forth in SEQ ID NO: 220, and a LCVR that comprises the nucleotide sequence set forth in SEQ ID NO: 225; (7) a polynucleotide encoding a HCVR that comprises the nucleotide sequence set forth in SEQ ID NO: 230, and a LCVR that comprises the nucleotide sequence set forth in SEQ ID NO: 235; (8) a polynucleotide encoding a HCVR that comprises the nucleotide sequence set forth in SEQ ID NO: 240, and a LCVR that comprises the nucleotide sequence set forth in SEQ ID NO: 245; (9) a polynucleotide encoding a HCVR that comprises the nucleotide sequence set forth in SEQ ID NO: 250, and a LCVR that comprises the nucleotide sequence set forth in SEQ ID NO: 255; (10) a polynucleotide encoding a HCVR that comprises the nucleotide sequence set forth in SEQ ID NO: 260, and a LCVR that comprises the nucleotide sequence set forth in SEQ ID NO: 265; (11) a polynucleotide encoding a HCVR that comprises the nucleotide sequence set forth in SEQ ID NO: 270, and a LCVR that comprises the nucleotide sequence set forth in SEQ ID NO: 275; (12) a polynucleotide encoding a HCVR that comprises the nucleotide sequence set forth in SEQ ID NO: 280, and a LCVR that comprises the nucleotide sequence set forth in SEQ ID NO: 285; (13) a polynucleotide encoding a HCVR that comprises the nucleotide sequence set forth in SEQ ID NO: 290, and a LCVR that comprises the nucleotide sequence set forth in SEQ ID NO: 295; (14) a polynucleotide encoding a HCVR that comprises the nucleotide sequence set forth in SEQ ID NO: 300, and a LCVR that comprises the nucleotide sequence set forth in SEQ ID NO: 305; (15) a polynucleotide encoding a HCVR that comprises the nucleotide sequence set forth in SEQ ID NO: 310, and a LCVR that comprises the nucleotide sequence set forth in SEQ ID NO: 315; (16) a polynucleotide encoding a HCVR that comprises the nucleotide sequence set forth in SEQ ID NO: 320, and a LCVR that comprises the nucleotide sequence set forth in SEQ ID NO: 325; (17) a polynucleotide encoding a HCVR that comprises the nucleotide sequence set forth in SEQ ID NO: 330, and a LCVR that comprises the nucleotide sequence set forth in SEQ ID NO: 335; (18) a polynucleotide encoding a HCVR that comprises the nucleotide sequence set forth in SEQ ID NO: 340, and a LCVR that comprises the nucleotide sequence set forth in SEQ ID NO: 345; (19) a polynucleotide encoding a HCVR that comprises the nucleotide sequence set forth in SEQ ID NO: 350, and a LCVR that comprises the nucleotide sequence set forth in SEQ ID NO: 355; (20) a polynucleotide encoding a HCVR that comprises the nucleotide sequence set forth in SEQ ID NO: 360, and a LCVR that comprises the nucleotide sequence set forth in SEQ ID NO: 365; (21) a polynucleotide encoding a HCVR that comprises the nucleotide sequence set forth in SEQ ID NO: 370, and a LCVR that comprises the nucleotide sequence set forth in SEQ ID NO: 375; (22) a polynucleotide encoding a HCVR that comprises the nucleotide sequence set forth in SEQ ID NO: 380, and a LCVR that comprises the nucleotide sequence set forth in SEQ ID NO: 385; (23) a polynucleotide encoding a HCVR that comprises the nucleotide sequence set forth in SEQ ID NO: 390, and a LCVR that comprises the nucleotide sequence set forth in SEQ ID NO: 395; (24) a polynucleotide encoding a HCVR that comprises the nucleotide sequence set forth in SEQ ID NO: 400, and a LCVR that comprises the nucleotide sequence set forth in SEQ ID NO: 405; (25) a polynucleotide encoding a HCVR that comprises the nucleotide sequence set forth in SEQ ID NO: 410, and a LCVR that comprises the nucleotide sequence set forth in SEQ ID NO: 415; (26) a polynucleotide encoding a HCVR that comprises the nucleotide sequence set forth in SEQ ID NO: 420, and a LCVR that comprises the nucleotide sequence set forth in SEQ ID NO: 425; (27) a polynucleotide encoding a HCVR that comprises the nucleotide sequence set forth in SEQ ID NO: 430, and a LCVR that comprises the nucleotide sequence set forth in SEQ ID NO: 435; (28) a polynucleotide encoding a HCVR that comprises the nucleotide sequence set forth in SEQ ID NO: 440, and a LCVR that comprises the nucleotide sequence set forth in SEQ ID NO: 445; (29) a polynucleotide encoding a HCVR that comprises the nucleotide sequence set forth in SEQ ID NO: 450, and a LCVR that comprises the nucleotide sequence set forth in SEQ ID NO: 455; (30) a polynucleotide encoding a HCVR that comprises the nucleotide sequence set forth in SEQ ID NO: 460, and a LCVR that comprises the nucleotide sequence set forth in SEQ ID NO: 465; (31) a polynucleotide encoding a HCVR that comprises the nucleotide sequence set forth in SEQ ID NO: 470, and a LCVR that comprises the nucleotide sequence set forth in SEQ ID NO: 475; or (32) a polynucleotide encoding a HCVR that comprises the nucleotide sequence set forth in SEQ ID NO: 480, and a LCVR that comprises the nucleotide sequence set forth in SEQ ID NO: 485, wherein the HCVR and LCVR are in either order.

[0238] In an embodiment, an anti-hTfR scFv, in V_{L}-(Gly₄Ser)₃(SEQ ID NO: 616)-V_{H} format (Gly₄Ser=SEQ ID NO: 537), comprises the amino acid sequence set forth in any one of SEQ ID NOS: 492-523. Also contemplated are such fusions that are in the format V_{H}-(Gly₄Ser)₃(SEQ ID NO: 616)-V_{L} (Gly₄Ser=SEQ ID NO: 537).

[0239] In an embodiment, the antigen-binding fragment comprises an scFv. In an embodiment, the scFv comprises the amino acid sequence set forth in SEQ ID NO: 508 (or a variant thereof) or comprises the amino acid sequence set forth in SEQ ID NO: 505 (or a variant thereof). In an embodiment, the scFv comprises the amino acid sequence set forth in SEQ ID NO: 508 (or a variant thereof). In an embodiment, the antigen-binding fragment comprises an scFv. In an embodiment, the scFv comprises the amino acid sequence set forth in SEQ ID NO: 505 (or a variant thereof).

[0240] In an embodiment, the TfR-binding delivery domain can be an scFv. In an embodiment, the anti-TfR scFv protein is (or the anti-TfR scFv protein comprises a sequence) at least 90%, at least 91%, at least 92%, at least 93%, at least 94%, at least 95%, at least 96%, at least 97%, at least 98%, at least 99%, at least 99.5%, or 100% identical to any one of SEQ ID NOS: 494, 503, 505, and 508 (and, e.g., retaining TfR-binding activity). Optionally, the anti-TfR scFv protein is (or the anti-TfR scFv protein comprises a sequence) at least 95%, at least 96%, at least 97%, at least 98%, at least 99%, at least 99.5%, or 100% identical to any one of SEQ ID NOS: 494, 503, 505, and 508 (and, e.g., retaining TfR-binding activity). Optionally, the anti-TfR scFv protein is (or the anti-TfR scFv protein comprises a sequence) at least 99%, at least 99.5%, or 100% identical to any one of SEQ ID NOS: 494, 503, 505, and 508 (and, e.g., retaining TfR-binding activity). Optionally, the anti-TfR scFv protein comprises the sequence set forth in any one of SEQ ID NOS: 494, 503, 505, and 508. Optionally, the anti-TfR scFv protein consists essentially of the sequence set forth in any one of SEQ ID NOS: 494, 503, 505, and 508. Optionally, the anti-TfR scFv protein consists of the sequence set forth in any one of SEQ ID NOS: 494, 503, 505, and 508.

[0241] In an embodiment, the anti-TfR scFv protein is (or the anti-TfR scFv protein comprises a sequence) at least 90%, at least 91%, at least 92%, at least 93%, at least 94%, at least 95%, at least 96%, at least 97%, at least 98%, at least 99%, at least 99.5%, or 100% identical to SEQ ID NO: 508 (and, e.g., retaining TfR-binding activity). Optionally, the anti-TfR scFv protein is (or the anti-TfR scFv protein comprises a sequence) at least 95%, at least 96%, at least 97%, at least 98%, at least 99%, at least 99.5%, or 100% identical to SEQ ID NO: 508 (and, e.g., retaining TfR-binding activity). Optionally, the anti-TfR scFv protein is (or the anti-TfR scFv protein comprises a sequence) at least 99%, at least 99.5%, or 100% identical to SEQ ID NO: 508 (and, e.g., retaining TfR-binding activity). Optionally, the anti-TfR scFv protein comprises the sequence set forth in SEQ ID NO: 508. Optionally, the anti-TfR scFv protein consists essentially of the sequence set forth in SEQ ID NO: 508. Optionally, the anti-TfR scFv protein consists of the sequence set forth in SEQ ID NO: 508.

[0242] In an embodiment, the anti-TfR scFv protein is (or the anti-TfR scFv protein comprises a sequence) at least 90%, at least 91%, at least 92%, at least 93%, at least 94%, at least 95%, at least 96%, at least 97%, at least 98%, at least 99%, at least 99.5%, or 100% identical to SEQ ID NO: 505 (and, e.g., retaining TfR-binding activity). Optionally, the anti-TfR scFv protein is (or the anti-TfR scFv protein comprises a sequence) at least 95%, at least 96%, at least 97%, at least 98%, at least 99%, at least 99.5%, or 100% identical to SEQ ID NO: 505 (and, e.g., retaining TfR-binding activity). Optionally, the anti-TfR scFv protein is (or the anti-TfR scFv protein comprises a sequence) at least 99%, at least 99.5%, or 100% identical to SEQ ID NO: 505 (and, e.g., retaining TfR-binding activity). Optionally, the anti-TfR scFv protein comprises the sequence set forth in SEQ ID NO: 505. Optionally, the anti-TfR scFv protein consists essentially of the sequence set forth in SEQ ID NO: 505. Optionally, the anti-TfR scFv protein consists of the sequence set forth in SEQ ID NO: 505.

[0243] In an embodiment, the multidomain therapeutic protein comprises the amino acid sequence set forth in SEQ ID NO: 737 (or a variant thereof) or comprises the amino acid sequence set forth in SEQ ID NO: 739 (or a variant thereof). In an embodiment, the multidomain therapeutic protein comprises the amino acid sequence set forth in SEQ ID NO: 737 (or a variant thereof). In an embodiment, the multidomain therapeutic protein comprises the amino acid sequence set forth in SEQ ID NO: 739 (or a variant thereof).

[0244] In another example, the TfR-binding delivery domain can be a Fab fragment (e.g., that binds specifically to human transferrin receptor). Fab fragments typically contain one complete light chain, VL and constant light domain, e.g., kappa (e.g., RTVAAPSVFIFPPSDEQLKSGTASVVCLLNNFYPREAKVQWKVDNALQSGNSQESVTEQDSKDS TYSLSSTLTLSKADYEKHKVYACEVTHQGLSSPVTKSFNRGEC (SEQ ID NO: 538)) and the VH and IgG1 CH1 portion (e.g., ASTKGPSVFPLAPSSKSTSGGTAALGCLVKDYFPEPVTVSWNSGALTSGVHTFPAVLQSSGLYS LSSVVTVPSSSLGTQTYICNVNHKPSNTKVDKKVEPKSCDKTH (SEQ ID NO: 539)) or IgG4 CH1 (e.g., ASTKGPSVFPLAPCSRSTSESTAALGCLVKDYFPEPVTVSWNSGALTSGVHTFPAVLQSSGLYS LSSVVTVPSSSLGTKTYTCNVDHKPSNTKVDKRVESKYGPPLLQGSG (SEQ ID NO: 611) or ASTKGPSVFPLAPCSRSTSESTAALGCLVKDYFPEPVTVSWNSGALTSGVHTFPAVLQSSGLYS LSSVVTVPSSSLGTKTYTCNVDHKPSNTKVDKRVESKYGPP (SEQ ID NO: 631)) of one heavy chain. Fab fragment antibodies can be generated by papain digestion of whole IgG antibodies to remove the entire Fc fragment, including the hinge region. In some embodiments, a Fab protein can comprise a heavy chain upstream of a light chain. In some embodiments, a Fab protein can comprise a light chain upstream of a heavy chain. In one example, the antibody or antigen-binding fragment thereof or Fab protein can comprise: (1) a heavy chain variable region (HCVR) that comprises the amino acid sequence set forth in SEQ ID NO: 171 or 680, or a heavy chain variable region that includes HCDR1, HCDR2 and HCDR3 of such a HCVR—linked to the CH1 domain- and a light chain variable region (LCVR) that comprises the amino acid sequence set forth in SEQ ID NO: 176, or LCDR1, LCDR2 and LCDR3 of such a LCVR-linked to the CL domain; (2) a heavy chain variable region (HCVR) that comprises the amino acid sequence set forth in SEQ ID NO: 181 or 681, or a heavy chain variable region that includes HCDR1, HCDR2 and HCDR3 of such a HCVR—linked to the CH1 domain—and a light chain variable region (LCVR) that comprises the amino acid sequence set forth in SEQ ID NO: 186, or LCDR1, LCDR2 and LCDR3 of such a LCVR-linked to the CL domain; (3) a heavy chain variable region (HCVR) that comprises the amino acid sequence set forth in SEQ ID NO: 191 or 682, or a heavy chain variable region that includes HCDR1, HCDR2 and HCDR3 of such a HCVR-linked to the CH1 domain—and a light chain variable region (LCVR) that comprises the amino acid sequence set forth in SEQ ID NO: 196, or LCDR1, LCDR2 and LCDR3 of such a LCVR-linked to the CL domain; (4) a heavy chain variable region (HCVR) that comprises the amino acid sequence set forth in SEQ ID NO: 201, or a heavy chain variable region that includes HCDR1, HCDR2 and HCDR3 of such a HCVR—linked to the CH1 domain—and a light chain variable region (LCVR) that comprises the amino acid sequence set forth in SEQ ID NO: 206 or 683, or LCDR1, LCDR2 and LCDR3 of such a LCVR-linked to the CL domain; (5) a heavy chain variable region (HCVR) that comprises the amino acid sequence set forth in SEQ ID NO: 211, or a heavy chain variable region that includes HCDR1, HCDR2 and HCDR3 of such a HCVR—linked to the CH1 domain—and a light chain variable region (LCVR) that comprises the amino acid sequence set forth in SEQ ID NO: 216 or 684, or LCDR1, LCDR2 and LCDR3 of such a LCVR-linked to the CL domain; (6) a heavy chain variable region (HCVR) that comprises the amino acid sequence set forth in SEQ ID NO: 221 or 685, or a heavy chain variable region that includes HCDR1, HCDR2 and HCDR3 of such a HCVR—linked to the CH1 domain—and a light chain variable region (LCVR) that comprises the amino acid sequence set forth in SEQ ID NO: 226 or 686, or LCDR1, LCDR2 and LCDR3 of such a LCVR-linked to the CL domain; (7) a heavy chain variable region (HCVR) that comprises the amino acid sequence set forth in SEQ ID NO: 231 or 687, or a heavy chain variable region that includes HCDR1, HCDR2 and HCDR3 of such a HCVR—linked to the CH1 domain—and a light chain variable region (LCVR) that comprises the amino acid sequence set forth in SEQ ID NO: 236 or 688, or LCDR1, LCDR2 and LCDR3 of such a LCVR-linked to the CL domain; (8) a heavy chain variable region (HCVR) that comprises the amino acid sequence set forth in SEQ ID NO: 241 or 689, or a heavy chain variable region that includes HCDR1, HCDR2 and HCDR3 of such a HCVR—linked to the CH1 domain—and a light chain variable region (LCVR) that comprises the amino acid sequence set forth in SEQ ID NO: 246 or 690, or LCDR1, LCDR2 and LCDR3 of such a LCVR-linked to the CL domain; (9) a heavy chain variable region (HCVR) that comprises the amino acid sequence set forth in SEQ ID NO: 251, or a heavy chain variable region that includes HCDR1, HCDR2 and HCDR3 of such a HCVR—linked to the CH1 domain—and a light chain variable region (LCVR) that comprises the amino acid sequence set forth in SEQ ID NO: 256, or LCDR1, LCDR2 and LCDR3 of such a LCVR-linked to the CL domain; (10) a heavy chain variable region (HCVR) that comprises the amino acid sequence set forth in SEQ ID NO: 261 or 691, or a heavy chain variable region that includes HCDR1, HCDR2 and HCDR3 of such a HCVR-linked to the CH1 domain—and a light chain variable region (LCVR) that comprises the amino acid sequence set forth in SEQ ID NO: 266, or LCDR1, LCDR2 and LCDR3 of such a LCVR-linked to the CL domain; (11) a heavy chain variable region (HCVR) that comprises the amino acid sequence set forth in SEQ ID NO: 271, or a heavy chain variable region that includes HCDR1, HCDR2 and HCDR3 of such a HCVR—linked to the CH1 domain—and a light chain variable region (LCVR) that comprises the amino acid sequence set forth in SEQ ID NO: 276, or LCDR1, LCDR2 and LCDR3 of such a LCVR-linked to the CL domain; (12) a heavy chain variable region (HCVR) that comprises the amino acid sequence set forth in SEQ ID NO: 281 or 692, or a heavy chain variable region that includes HCDR1, HCDR2 and HCDR3 of such a HCVR-linked to the CH1 domain—and a light chain variable region (LCVR) that comprises the amino acid sequence set forth in SEQ ID NO: 286 or 693, or LCDR1, LCDR2 and LCDR3 of such a LCVR-linked to the CL domain; (13) a heavy chain variable region (HCVR) that comprises the amino acid sequence set forth in SEQ ID NO: 291, or a heavy chain variable region that includes HCDR1, HCDR2 and HCDR3 of such a HCVR—linked to the CH1 domain—and a light chain variable region (LCVR) that comprises the amino acid sequence set forth in SEQ ID NO: 296, or LCDR1, LCDR2 and LCDR3 of such a LCVR-linked to the CL domain; (14) a heavy chain variable region (HCVR) that comprises the amino acid sequence set forth in SEQ ID NO: 301, or a heavy chain variable region that includes HCDR1, HCDR2 and HCDR3 of such a HCVR-linked to the CH1 domain—and a light chain variable region (LCVR) that comprises the amino acid sequence set forth in SEQ ID NO: 306, or LCDR1, LCDR2 and LCDR3 of such a LCVR-linked to the CL domain; (15) a heavy chain variable region (HCVR) that comprises the amino acid sequence set forth in SEQ ID NO: 311 or 694, or a heavy chain variable region that includes HCDR1, HCDR2 and HCDR3 of such a HCVR—linked to the CH1 domain—and a light chain variable region (LCVR) that comprises the amino acid sequence set forth in SEQ ID NO: 316 or 695, or LCDR1, LCDR2 and LCDR3 of such a LCVR-linked to the CL domain; (16) a heavy chain variable region (HCVR) that comprises the amino acid sequence set forth in SEQ ID NO: 321, or a heavy chain variable region that includes HCDR1, HCDR2 and HCDR3 of such a HCVR—linked to the CH1 domain—and a light chain variable region (LCVR) that comprises the amino acid sequence set forth in SEQ ID NO: 326, or LCDR1, LCDR2 and LCDR3 of such a LCVR-linked to the CL domain; (17) a heavy chain variable region (HCVR) that comprises the amino acid sequence set forth in SEQ ID NO: 331 or 696, or a heavy chain variable region that includes HCDR1, HCDR2 and HCDR3 of such a HCVR—linked to the CH1 domain—and a light chain variable region (LCVR) that comprises the amino acid sequence set forth in SEQ ID NO: 336, or LCDR1, LCDR2 and LCDR3 of such a LCVR-linked to the CL domain; (18) a heavy chain variable region (HCVR) that comprises the amino acid sequence set forth in SEQ ID NO: 341, or a heavy chain variable region that includes HCDR1, HCDR2 and HCDR3 of such a HCVR—linked to the CH1 domain—and a light chain variable region (LCVR) that comprises the amino acid sequence set forth in SEQ ID NO: 346, or LCDR1, LCDR2 and LCDR3 of such a LCVR-linked to the CL domain; (19) a heavy chain variable region (HCVR) that comprises the amino acid sequence set forth in SEQ ID NO: 351 or 697, or a heavy chain variable region that includes HCDR1, HCDR2 and HCDR3 of such a HCVR—linked to the CH1 domain—and a light chain variable region (LCVR) that comprises the amino acid sequence set forth in SEQ ID NO: 356 or 698, or LCDR1, LCDR2 and LCDR3 of such a LCVR-linked to the CL domain; (20) a heavy chain variable region (HCVR) that comprises the amino acid sequence set forth in SEQ ID NO: 361 or 699, or a heavy chain variable region that includes HCDR1, HCDR2 and HCDR3 of such a HCVR—linked to the CH1 domain—and a light chain variable region (LCVR) that comprises the amino acid sequence set forth in SEQ ID NO: 366, or LCDR1, LCDR2 and LCDR3 of such a LCVR-linked to the CL domain; (21) a heavy chain variable region (HCVR) that comprises the amino acid sequence set forth in SEQ ID NO: 371 or 700, or a heavy chain variable region that includes HCDR1, HCDR2 and HCDR3 of such a HCVR—linked to the CH1 domain—and a light chain variable region (LCVR) that comprises the amino acid sequence set forth in SEQ ID NO: 376, or LCDR1, LCDR2 and LCDR3 of such a LCVR-linked to the CL domain; (22) a heavy chain variable region (HCVR) that comprises the amino acid sequence set forth in SEQ ID NO: 381, or a heavy chain variable region that includes HCDR1, HCDR2 and HCDR3 of such a HCVR—linked to the CH1 domain—and a light chain variable region (LCVR) that comprises the amino acid sequence set forth in SEQ ID NO: 386, or LCDR1, LCDR2 and LCDR3 of such a LCVR-linked to the CL domain; (23) a heavy chain variable region (HCVR) that comprises the amino acid sequence set forth in SEQ ID NO: 391, or a heavy chain variable region that includes HCDR1, HCDR2 and HCDR3 of such a HCVR—linked to the CH1 domain—and a light chain variable region (LCVR) that comprises the amino acid sequence set forth in SEQ ID NO: 396, or LCDR1, LCDR2 and LCDR3 of such a LCVR-linked to the CL domain; (24) a heavy chain variable region (HCVR) that comprises the amino acid sequence set forth in SEQ ID NO: 401, or a heavy chain variable region that includes HCDR1, HCDR2 and HCDR3 of such a HCVR—linked to the CH1 domain—and a light chain variable region (LCVR) that comprises the amino acid sequence set forth in SEQ ID NO: 406, or LCDR1, LCDR2 and LCDR3 of such a LCVR-linked to the CL domain; (25) a heavy chain variable region (HCVR) that comprises the amino acid sequence set forth in SEQ ID NO: 411, or a heavy chain variable region that includes HCDR1, HCDR2 and HCDR3 of such a HCVR—linked to the CH1 domain—and a light chain variable region (LCVR) that comprises the amino acid sequence set forth in SEQ ID NO: 416, or LCDR1, LCDR2 and LCDR3 of such a LCVR-linked to the CL domain; (26) a heavy chain variable region (HCVR) that comprises the amino acid sequence set forth in SEQ ID NO: 421 or 701, or a heavy chain variable region that includes HCDR1, HCDR2 and HCDR3 of such a HCVR—linked to the CH1 domain—and a light chain variable region (LCVR) that comprises the amino acid sequence set forth in SEQ ID NO: 426, or LCDR1, LCDR2 and LCDR3 of such a LCVR-linked to the CL domain; (27) a heavy chain variable region (HCVR) that comprises the amino acid sequence set forth in SEQ ID NO: 431, or a heavy chain variable region that includes HCDR1, HCDR2 and HCDR3 of such a HCVR—linked to the CH1 domain—and a light chain variable region (LCVR) that comprises the amino acid sequence set forth in SEQ ID NO: 436, or LCDR1, LCDR2 and LCDR3 of such a LCVR-linked to the CL domain; (28) a heavy chain variable region (HCVR) that comprises the amino acid sequence set forth in SEQ ID NO: 441, or a heavy chain variable region that includes HCDR1, HCDR2 and HCDR3 of such a HCVR—linked to the CH1 domain—and a light chain variable region (LCVR) that comprises the amino acid sequence set forth in SEQ ID NO: 446, or LCDR1, LCDR2 and LCDR3 of such a LCVR-linked to the CL domain; (29) a heavy chain variable region (HCVR) that comprises the amino acid sequence set forth in SEQ ID NO: 451, or a heavy chain variable region that includes HCDR1, HCDR2 and HCDR3 of such a HCVR—linked to the CH1 domain—and a light chain variable region (LCVR) that comprises the amino acid sequence set forth in SEQ ID NO: 456, or LCDR1, LCDR2 and LCDR3 of such a LCVR-linked to the CL domain; (30) a heavy chain variable region (HCVR) that comprises the amino acid sequence set forth in SEQ ID NO: 461, or a heavy chain variable region that includes HCDR1, HCDR2 and HCDR3 of such a HCVR—linked to the CH1 domain—and a light chain variable region (LCVR) that comprises the amino acid sequence set forth in SEQ ID NO: 466, or LCDR1, LCDR2 and LCDR3 of such a LCVR-linked to the CL domain; (31) a heavy chain variable region (HCVR) that comprises the amino acid sequence set forth in SEQ ID NO: 471 or 702, or a heavy chain variable region that includes HCDR1, HCDR2 and HCDR3 of such a HCVR—linked to the CH1 domain—and a light chain variable region (LCVR) that comprises the amino acid sequence set forth in SEQ ID NO: 476 or 632, or LCDR1, LCDR2 and LCDR3 of such a LCVR-linked to the CL domain; and/or (32) a heavy chain variable region (HCVR) that comprises the amino acid sequence set forth in SEQ ID NO: 481, or a heavy chain variable region that includes HCDR1, HCDR2 and HCDR3 of such a HCVR—linked to the CH1 domain—and a light chain variable region (LCVR) that comprises the amino acid sequence set forth in SEQ ID NO: 486 or 703, or LCDR1, LCDR2 and LCDR3 of such a LCVR-linked to the CL domain. For example, the CH1 can be SEQ ID NO: 539 or 611.

[0245] In one example, the antibody or antigen-binding fragment thereof or Fab protein can comprise: (23) a heavy chain variable region (HCVR) that comprises the amino acid sequence set forth in SEQ ID NO: 391, or a heavy chain variable region that includes HCDR1, HCDR2 and HCDR3 of such a HCVR—linked to the CH1 domain—and a light chain variable region (LCVR) that comprises the amino acid sequence set forth in SEQ ID NO: 396, or LCDR1, LCDR2 and LCDR3 of such a LCVR-linked to the CL domain; or (25) a heavy chain variable region (HCVR) that comprises the amino acid sequence set forth in SEQ ID NO: 411, or a heavy chain variable region that includes HCDR1, HCDR2 and HCDR3 of such a HCVR-linked to the CH1 domain—and a light chain variable region (LCVR) that comprises the amino acid sequence set forth in SEQ ID NO: 416, or LCDR1, LCDR2 and LCDR3 of such a LCVR-linked to the CL domain. In one example, the Fab protein can comprise a heavy chain variable region (HCVR) that comprises the amino acid sequence set forth in SEQ ID NO: 391, or a heavy chain variable region that includes HCDR1, HCDR2 and HCDR3 of such a HCVR—linked to the CH1 domain—and a light chain variable region (LCVR) that comprises the amino acid sequence set forth in SEQ ID NO: 396, or LCDR1, LCDR2 and LCDR3 of such a LCVR-linked to the CL domain. In one example, the Fab protein can comprise a heavy chain variable region (HCVR) that comprises the amino acid sequence set forth in SEQ ID NO: 411, or a heavy chain variable region that includes HCDR1, HCDR2 and HCDR3 of such a HCVR—linked to the CH1 domain—and a light chain variable region (LCVR) that comprises the amino acid sequence set forth in SEQ ID NO: 416, or LCDR1, LCDR2 and LCDR3 of such a LCVR-linked to the CL domain.

[0246] In one example, the antibody or antigen-binding fragment thereof or Fab protein can comprise: (1) a light chain that comprises the amino acid sequence set forth in SEQ ID NO: 540 and a heavy chain that comprises the amino acid sequence set forth in SEQ ID NO: 541 (31874B); (2) a light chain that comprises the amino acid sequence set forth in SEQ ID NO: 542 and a heavy chain that comprises the amino acid sequence set forth in SEQ ID NO: 543 (31863B); (3) a light chain that comprises the amino acid sequence set forth in SEQ ID NO: 544 and a heavy chain that comprises the amino acid sequence set forth in SEQ ID NO: 545 (69348); (4) a light chain that comprises the amino acid sequence set forth in SEQ ID NO: 546 and a heavy chain that comprises the amino acid sequence set forth in SEQ ID NO: 547 (69340); (5) a light chain that comprises the amino acid sequence set forth in SEQ ID NO: 548 and a heavy chain that comprises the amino acid sequence set forth in SEQ ID NO: 549 (69331); (6) a light chain that comprises the amino acid sequence set forth in SEQ ID NO: 550 and a heavy chain that comprises the amino acid sequence set forth in SEQ ID NO: 551 (69332); (7) a light chain that comprises the amino acid sequence set forth in SEQ ID NO: 552 and a heavy chain that comprises the amino acid sequence set forth in SEQ ID NO: 553 (69326); (8) a light chain that comprises the amino acid sequence set forth in SEQ ID NO: 554 and a heavy chain that comprises the amino acid sequence set forth in SEQ ID NO: 555 (69329); (9) a light chain that comprises the amino acid sequence set forth in SEQ ID NO: 556 and a heavy chain that comprises the amino acid sequence set forth in SEQ ID NO: 557 (69323); (10) a light chain that comprises the amino acid sequence set forth in SEQ ID NO: 558 and a heavy chain that comprises the amino acid sequence set forth in SEQ ID NO: 559 (69305); (11) a light chain that comprises the amino acid sequence set forth in SEQ ID NO: 560 and a heavy chain that comprises the amino acid sequence set forth in SEQ ID NO: 561 (69307); (12) a light chain that comprises the amino acid sequence set forth in SEQ ID NO: 562 and a heavy chain that comprises the amino acid sequence set forth in SEQ ID NO: 563 (12795B); (13) a light chain that comprises the amino acid sequence set forth in SEQ ID NO: 564 and a heavy chain that comprises the amino acid sequence set forth in SEQ ID NO: 565 or SEQ ID NO: 604 or SEQ ID NO: 633 (12798B); (14) a light chain that comprises the amino acid sequence set forth in SEQ ID NO: 566 and a heavy chain that comprises the amino acid sequence set forth in SEQ ID NO: 567 or SEQ ID NO: 605 or SEQ ID NO: 634 (12799B); (15) a light chain that comprises the amino acid sequence set forth in SEQ ID NO: 568 and a heavy chain that comprises the amino acid sequence set forth in SEQ ID NO: 569 (12801B); (16) a light chain that comprises the amino acid sequence set forth in SEQ ID NO: 570 and a heavy chain that comprises the amino acid sequence set forth in SEQ ID NO: 571 (12802B); (17) a light chain that comprises the amino acid sequence set forth in SEQ ID NO: 572 and a heavy chain that comprises the amino acid sequence set forth in SEQ ID NO: 573 (12808B); (18) a light chain that comprises the amino acid sequence set forth in SEQ ID NO: 574 and a heavy chain that comprises the amino acid sequence set forth in SEQ ID NO: 575 (12812B); (19) a light chain that comprises the amino acid sequence set forth in SEQ ID NO: 576 and a heavy chain that comprises the amino acid sequence set forth in SEQ ID NO: 577 (12816B); (20) a light chain that comprises the amino acid sequence set forth in SEQ ID NO: 578 and a heavy chain that comprises the amino acid sequence set forth in SEQ ID NO: 579 (12833B); (21) a light chain that comprises the amino acid sequence set forth in SEQ ID NO: 580 and a heavy chain that comprises the amino acid sequence set forth in SEQ ID NO: 581 (12834B); (22) a light chain that comprises the amino acid sequence set forth in SEQ ID NO: 582 and a heavy chain that comprises the amino acid sequence set forth in SEQ ID NO: 583 (12835B); (23) a light chain that comprises the amino acid sequence set forth in SEQ ID NO: 584 and a heavy chain that comprises the amino acid sequence set forth in SEQ ID NO: 585 or SEQ ID NO: 606 or SEQ ID NO: 635 (12847B); (24) a light chain that comprises the amino acid sequence set forth in SEQ ID NO: 586 and a heavy chain that comprises the amino acid sequence set forth in SEQ ID NO: 587 (12848B); (25) a light chain that comprises the amino acid sequence set forth in SEQ ID NO: 588 and a heavy chain that comprises the amino acid sequence set forth in SEQ ID NO: 589 or SEQ ID NO: 607 or SEQ ID NO: 636 (12843B); (26) a light chain that comprises the amino acid sequence set forth in SEQ ID NO: 590 and a heavy chain that comprises the amino acid sequence set forth in SEQ ID NO: 591 (12844B); (27) a light chain that comprises the amino acid sequence set forth in SEQ ID NO: 592 and a heavy chain that comprises the amino acid sequence set forth in SEQ ID NO: 593 or SEQ ID NO: 608 or SEQ ID NO: 637 (12845B); (28) a light chain that comprises the amino acid sequence set forth in SEQ ID NO: 594 and a heavy chain that comprises the amino acid sequence set forth in SEQ ID NO: 595 or SEQ ID NO: 609 or SEQ ID NO: 638 (12839B); (29) a light chain that comprises the amino acid sequence set forth in SEQ ID NO: 596 and a heavy chain that comprises the amino acid sequence set forth in SEQ ID NO: 597 (12841B); (30) a light chain that comprises the amino acid sequence set forth in SEQ ID NO: 598 and a heavy chain that comprises the amino acid sequence set forth in SEQ ID NO: 599 (12850B); (31) a light chain that comprises the amino acid sequence set forth in SEQ ID NO: 600 and a heavy chain that comprises the amino acid sequence set forth in SEQ ID NO: 601 (69261); or (32) a light chain that comprises the amino acid sequence set forth in SEQ ID NO: 602 and a heavy chain that comprises the amino acid sequence set forth in SEQ ID NO: 603 (69263).

[0247] In one example, the antibody or antigen-binding fragment thereof or Fab protein can comprise: (23) a light chain that comprises the amino acid sequence set forth in SEQ ID NO: 584 and a heavy chain that comprises the amino acid sequence set forth in SEQ ID NO: 585 or SEQ ID NO: 606 or SEQ ID NO: 635 (12847B); or (25) a light chain that comprises the amino acid sequence set forth in SEQ ID NO: 588 and a heavy chain that comprises the amino acid sequence set forth in SEQ ID NO: 589 or SEQ ID NO: 607 or SEQ ID NO: 636 (12843B). In one example, the antibody or antigen-binding fragment thereof or Fab protein can comprise a light chain that comprises the amino acid sequence set forth in SEQ ID NO: 584 and a heavy chain that comprises the amino acid sequence set forth in SEQ ID NO: 585 or SEQ ID NO: 606 or SEQ ID NO: 635 (12847B). In one example, the antibody or antigen-binding fragment thereof or Fab protein can comprise a light chain that comprises the amino acid sequence set forth in SEQ ID NO: 584 and a heavy chain that comprises the amino acid sequence set forth in SEQ ID NO: 635 (12847B). In one example, the antibody or antigen-binding fragment thereof or Fab protein can comprise a light chain that comprises the amino acid sequence set forth in SEQ ID NO: 588 and a heavy chain that comprises the amino acid sequence set forth in SEQ ID NO: 589 or SEQ ID NO: 607 or SEQ ID NO: 636 (12843B).

[0248] In an embodiment, the antigen-binding fragment comprises a Fab protein. In an embodiment, the Fab protein comprises the amino acid sequences set forth in SEQ ID NO: 584 and 635 (or variants thereof) or comprises the amino acid sequences set forth in SEQ ID NO: 588 and 636 (or variants thereof). In an embodiment, the Fab protein comprises the amino acid sequences set forth in SEQ ID NO: 584 and 635 (or variants thereof). In an embodiment, the Fab protein comprises the amino acid sequences set forth in SEQ ID NO: 588 and 636 (or variants thereof).

[0249] In some embodiments, the antibody or antigen-binding fragment thereof or Fab protein can comprise a light chain that comprises the amino acid sequence set forth in SEQ ID NO: 584 and a heavy chain that comprises the amino acid sequence set forth in SEQ ID NO: 635 (12847B). In one example, Fab protein can comprise the heavy chain upstream of the light chain. For example, the Fab protein can comprise, consist essentially of, or consist of the sequence set forth in SEQ ID NO: 815. Optionally, the coding sequence for the Fab protein can comprise, consist essentially of, or consist of the sequence set forth in SEQ ID NO: 814. In another example, Fab protein can comprise the light chain upstream of the heavy chain. For example, the Fab protein can comprise, consist essentially of, or consist of the sequence set forth in SEQ ID NO: 817. Optionally, the coding sequence for the Fab protein can comprise, consist essentially of, or consist of the sequence set forth in SEQ ID NO: 816.

[0250] In an embodiment, the TfR-binding delivery domain can be a Fab. In an embodiment, the anti-TfR Fab protein is (or the anti-TfR Fab protein comprises a sequence) at least 90%, at least 91%, at least 92%, at least 93%, at least 94%, at least 95%, at least 96%, at least 97%, at least 98%, at least 99%, at least 99.5%, or 100% identical to SEQ ID NO: 815 (and, e.g., retaining TfR-binding activity). Optionally, the anti-TfR Fab protein is (or the anti-TfR Fab protein comprises a sequence) at least 95%, at least 96%, at least 97%, at least 98%, at least 99%, at least 99.5%, or 100% identical to SEQ ID NO: 815 (and, e.g., retaining TfR-binding activity). Optionally, the anti-TfR Fab protein is (or the anti-TfR Fab protein comprises a sequence) at least 99%, at least 99.5%, or 100% identical to SEQ ID NO: 815 (and, e.g., retaining TfR-binding activity). Optionally, the anti-TfR Fab protein comprises sequence set forth in SEQ ID NO: 815. Optionally, the anti-TfR Fab protein consists essentially of the sequence set forth in SEQ ID NO: 815. Optionally, the anti-TfR Fab protein consists of the sequence set forth in SEQ ID NO: 815.

[0251] In an embodiment, the anti-TfR Fab protein is (or the anti-TfR Fab protein comprises a sequence) at least 90%, at least 91%, at least 92%, at least 93%, at least 94%, at least 95%, at least 96%, at least 97%, at least 98%, at least 99%, at least 99.5%, or 100% identical to SEQ ID NO: 817 (and, e.g., retaining TfR-binding activity). Optionally, the anti-TfR Fab protein is (or the anti-TfR Fab protein comprises a sequence) at least 95%, at least 96%, at least 97%, at least 98%, at least 99%, at least 99.5%, or 100% identical to SEQ ID NO: 817 (and, e.g., retaining TfR-binding activity). Optionally, the anti-TfR Fab protein is (or the anti-TfR Fab protein comprises a sequence) at least 99%, at least 99.5%, or 100% identical to SEQ ID NO: 817 (and, e.g., retaining TfR-binding activity). Optionally, the anti-TfR Fab protein comprises the sequence set forth in SEQ ID NO: 817. Optionally, the anti-TfR Fab protein consists essentially of the sequence set forth in SEQ ID NO: 817. Optionally, the anti-TfR Fab protein consists of the sequence set forth in SEQ ID NO: 817.

[0252] “31874B”; “31863B”; “69348”; “69340”; “69331”; “69332”; “69326”; “69329”; “69323”; “69305”; “69307”; “12795B”; “12798B”; “12799B”; “12801B”; “12802B”; “12808B”; “12812B”; “12816B”; “12833B”; “12834B”; “12835B”; “12847B”; “12848B”; “12843B”; “12844B”; “12845B”; “12839B”; “12841B”; “12850B”; “69261”; and “69263” refer to anti-TfR:ASM fusion proteins, e.g., anti-TfR scFv:ASM or anti-TfR Fab:ASM, comprising a light chain variable region comprising the amino acid sequence set forth in SEQ ID NO: 176, 186, 196, 206, 683, 216, 684, 226, 686, 236, 688, 246, 690, 256, 266, 276, 286, 693, 296, 306, 316, 695, 326, 336, 346, 356, 698, 366, 376, 386, 396, 406, 416, 426, 436, 446, 456, 466, 476, 632, 486, or 703 (or a variant thereof), and a heavy chain variable region comprising the amino acid sequence set forth in SEQ ID NO: 171, 680, 181, 681, 191, 682, 201, 211, 221, 685, 231, 687, 241, 689, 251, 261, 691, 271, 281, 692, 291, 301, 311, 694, 321, 331, 696, 341, 351, 697, 361, 699, 371, 700, 381, 391, 401, 411, 421, 701, 431, 441, 451, 461, 471, 702, or 481 (or a variant thereof); which, in the case of an scFv, can be fused together (in either order), e.g., by a peptide linker (e.g., (G₄S)₃(SEQ ID NO: 616)) (G₄S=SEQ ID NO: 537), respectively; or that comprise a VH that comprises the CDRs thereof (CDR-H1 (or a variant thereof), CDR-H2 (or a variant thereof) and CDR-H3 (or a variant thereof)) and/or a V_{L} that comprises the CDRs thereof (CDR-L1 (or a variant thereof), CDR-L2 (or a variant thereof) and CDR-L3 (or a variant thereof)), wherein the VH fused to the V_{L} or the V_{L} fused to the V_{H}, in the case of an scFv, can be fused, e.g., by a peptide linker (e.g., (G₄S)₂(SEQ ID NO: 617)) (G₄S=SEQ ID NO: 537), to ASM.

[0253] In some embodiments, the anti-TfR antigen-binding protein described herein comprises a humanized antibody or antigen binding fragment thereof, murine antibody or antigen binding fragment thereof, chimeric antibody or antigen binding fragment thereof, monoclonal antibody or antigen binding fragment thereof (e.g., monovalent Fab′, divalent Fab2, F(ab)′3 fragments, single-chain variable fragment (scFv), bis-scFv, (scFv)2, diabody, bivalent antibody, one-armed antibody, minibody, nanobody, triabody, tetrabody, disulfide stabilized Fv protein (dsFv), single-domain antibody (sdAb), Ig NAR, camelid antibody or antigen binding fragment thereof, bispecific antibody or biding fragment thereof, (e.g., bisscFv, or a bispecific T-cell engager (BiTE)), trispecific antibody (e.g., F(ab)′3 fragments or a triabody), or a chemically modified derivative thereof. In some embodiments, the anti-TfR antigen-binding protein can be bivalent. In some embodiments, the anti-TfR antigen-binding protein can be monovalent (e.g., one-arm antibody).

[0254] The term “humanized antibody,” as used herein, includes antibodies in which CDR sequences derived from the germline of another mammalian species, such as a mouse, have been grafted onto human framework sequences, or otherwise modified to increase their similarity to antibody variants produced naturally in humans.

[0255] In some cases, the anti-TfR antigen-binding protein is an antibody which comprises one or more mutations in a framework region, e.g., in the CH1 domain, CH2 domain, CH3 domain, hinge region, or a combination thereof. In some embodiments, the one or more mutations are to stabilize the antibody and/or to increase half-life. In some embodiments, the one or more mutations are to modulate Fc receptor interactions, to reduce or eliminate Fc effector functions such as FcyR, antibody-dependent cell-mediated cytotoxicity (ADCC), or complement-dependent cytotoxicity (CDC). In additional embodiments, the one or more mutations are to modulate glycosylation.

[0256] In some embodiments, one, two or more mutations (e.g., amino acid substitutions) are introduced into the Fc region of an antibody described herein (e.g., in a CH2 domain (residues 231-340 of human IgG1) and/or CH3 domain (residues 341-447 of human IgG1) and/or the hinge region, with numbering according to the Kabat numbering system (e.g., the EU index in Kabat)) to alter one or more functional properties of the antibody, such as serum half-life, complement fixation, Fc receptor binding and/or antigen-dependent cellular cytotoxicity. In some embodiments, one, two or more mutations (e.g., amino acid substitutions) are introduced into the hinge region of the Fc region (CH1 domain) such that the number of cysteine residues in the hinge region are altered (e.g., increased or decreased) as described in, e.g., U.S. Pat. No. 5,677,425. The number of cysteine residues in the hinge region of the CH1 domain can be altered to, e.g., facilitate assembly of the light and heavy chains, or to alter (e.g., increase or decrease) the stability of the antibody or to facilitate linker conjugation.

[0257] In some embodiments, one, two or more amino acid mutations (i.e., substitutions, insertions or deletions) are introduced into an IgG constant domain, or FcRn-binding fragment thereof (preferably an Fc or hinge-Fc domain fragment) to alter (e.g., decrease or increase) half-life of the antibody in vivo. See, e.g., PCT Publication Nos. WO 02/060919; WO 98/23289; and WO 97/34631; and U.S. Pat. Nos. 5,869,046, 6,121,022, 6,277,375 and 6,165,745 for examples of mutations that will alter (e.g., decrease or increase) the half-life of an antibody in vivo. In some embodiments, the Fc region comprises a mutation at residue position L234, L235, or a combination thereof. In some embodiments, the mutations comprise L234 and L235. In some embodiments, the mutations comprise L234A and L235A.

[0258] The anti-TfR antibodies and antigen-binding fragments described herein may be modified after translation, e.g., glycosylated.

[0259] For example, antibodies and antigen-binding fragments described herein may be glycosylated (e.g., N-glycosylated and/or O-glycosylated) or aglycosylated. Typically, antibodies and antigen-binding fragments are glycosylated at the conserved residue N297 of the IgG Fc domain. Some antibodies and fragments include one or more additional glycosylation sites in a variable region. In an embodiment, the glycosylation site is in the following context: FN₂₉₇S or YN₂₉₇S.

[0260] In an embodiment, said glycosylation is any one or more of three different N-glycan types: high mannose, complex and/or hybrid that are found on IgGs with their respective linkage. Complex and hybrid types exist with core fucosylation, addition of a fucose residue to the innermost N-acetylglucosamine, and without core fucosylation.

[0261] In some cases, the anti-TfR antigen-binding protein is an aglycosylated antibody, i.e., an antibody that does not comprise a glycosylation sequence that might interfere with a transglutamination reaction, for instance an antibody that does not have a saccharide group at N180 and/or N297 on one or more heavy chains. In particular embodiments, an antibody heavy chain has an N180 mutation. In other words, the antibody is mutated to no longer have an asparagine residue at position 180 according to the EU numbering system as disclosed by Kabat et al. In particular embodiments, an antibody heavy chain has an N180Q mutation. In particular embodiments, an antibody heavy chain has an N297 mutation. In particular embodiments, an antibody heavy chain has an N297Q or an N297D mutation. Antibodies comprising such above-described mutations can be prepared by site-directed mutagenesis to remove or disable a glycosylation sequence or by site-directed mutagenesis to insert a glutamine residue at site apart from any interfering glycosylation site or any other interfering structure. Such antibodies also can be isolated from natural or artificial sources. Aglycosylated antibodies also include antibodies comprising a T299 or S298P or other mutations, or combinations of mutations that result in a lack of glycosylation.

[0262] In some cases, the antigen-binding protein is a deglycosylated antibody, i.e., an antibody in which a saccharide group at is removed to facilitate transglutaminase-mediated conjugation. Saccharides include, but are not limited to, N-linked oligosaccharides. In some embodiments, deglycosylation is performed at residue N180. In some embodiments, deglycosylation is performed at residue N297. In some embodiments, removal of saccharide groups is accomplished enzymatically, included but not limited to via PNGase.

[0263] In an embodiment, an antibody or fragment described herein is afucosylated.

[0264] The antibodies and antigen-binding fragments described herein may also be post-translationally modified in other ways including, for example: Glu or Gln cyclization at N-terminus; Loss of positive N-terminal charge; Lys variants at C-terminus; Deamidation (Asn to Asp); Isomerization (Asp to isoAsp); Deamidation (Gln to Glu); Oxidation (Cys, His, Met, Tyr, Trp); and/or Disulfide bond heterogeneity (Shuffling, thioether and trisulfide formation).

[0265] In some embodiments, an antibody disclosed herein comprises Q295 which can be native to the antibody heavy chain sequence. In some embodiments, an antibody heavy chain disclosed herein may comprise Q295. In some embodiments, an antibody heavy chain disclosed herein may comprise Q295 and an amino acid substitution N297D.

[0266] According to certain embodiments of the present disclosure, anti-TfR antibodies and antigen-binding fragments are provided comprising an Fc domain comprising one or more mutations which enhance or diminish antibody binding to the FcRn receptor, e.g., at acidic pH as compared to neutral pH. For example, the present disclosure includes anti-TfR antibodies comprising a mutation in the CH2 or a CH3 region of the Fc domain, wherein the mutation(s) increases the affinity of the Fc domain to FcRn in an acidic environment (e.g., in an endosome where pH ranges from about 5.5 to about 6.0). Such mutations may result in an increase in serum half-life of the antibody when administered to an animal.

[0267] Non-limiting examples of such Fc modifications include, e.g., a modification at position:
[0268] 250 (e.g., E or Q);
[0269] 250 and 428 (e.g., L or F);
[0270] 252 (e.g., L/Y/F/W or T),
[0271] 254 (e.g., S or T), and/or
[0272] 256 (e.g., S/R/Q/E/D or T); and/or a modification at position:
[0273] 428 and/or 433 (e.g., H/L/R/S/P/Q or K), and/or
[0274] 434 (e.g., A, W, H, F or Y); and/or a modification at position:
[0275] 250 and/or 428; and/or a modification at position:
[0276] 307 or 308 (e.g., 308F, V308F), and/or
[0277] 434.

[0278] In an embodiment, the modification comprises:
[0279] a 428L (e.g., M428L) and 434S (e.g., N434S) modification;
[0280] a 428L, 2591 (e.g., V259I), and 308F (e.g., V308F) modification;
[0281] a 433K (e.g., H433K) and a 434 (e.g., 434Y) modification;
[0282] a 252, 254, and 256 (e.g., 252Y, 254T, and 256E) modification;
[0283] a 250Q and 428L modification (e.g., T250Q and M428L); and/or
[0284] a 307 and/or 308 modification (e.g., 308F or 308P).

[0285] In yet another embodiment, the modification comprises a 265A (e.g., D265A) and/or a 297A (e.g., N297A) modification.

[0286] For example, the present disclosure includes anti-TfR antibodies comprising an Fc domain comprising one or more pairs or groups of mutations selected from the group consisting of:
[0287] 250Q and 248L (e.g., T250Q and M248L);
[0288] 252Y, 254T and 256E (e.g., M252Y, S254T and T256E);
[0289] 2571 and 3111 (e.g., P2571 and Q3111);
[0290] 2571 and 434H (e.g., P2571 and N434H);
[0291] 376V and 434H (e.g., D376V and N434H);
[0292] 307A, 380A and 434A (e.g., T307A, E380A and N434A);
[0293] 428L and 434S (e.g., M428L and N434S); and
[0294] 433K and 434F (e.g., H433K and N434F).

[0295] In an embodiment, the heavy chain constant domain is gamma4 comprising an S228P and/or S108P mutation. See Angal et al., A single amino acid substitution abolishes the heterogeneity of chimeric mouse/human (IgG4) antibody, Mol Immunol. 1993 January; 30(1):105-108.

[0296] All possible combinations of the foregoing Fc domain mutations, and other mutations within the antibody variable domains disclosed herein, are contemplated within the scope of the present disclosure.

[0297] The anti-TfR antibodies described herein may comprise a modified Fc domain having reduced effector function. As used herein, a “modified Fc domain having reduced effector function” means any Fc portion of an immunoglobulin that has been modified, mutated, truncated, etc., relative to a wild-type, naturally occurring Fc domain such that a molecule comprising the modified Fc exhibits a reduction in the severity or extent of at least one effect selected from the group consisting of cell killing (e.g., ADCC and/or CDC), complement activation, phagocytosis and opsonization, relative to a comparator molecule comprising the wild-type, naturally occurring version of the Fc portion. In certain embodiments, a “modified Fc domain having reduced effector function” is an Fc domain with reduced or attenuated binding to an Fc receptor (e.g., FcγR).

[0298] In certain embodiments, the modified Fc domain is a variant IgG1 Fc or a variant IgG4 Fc comprising a substitution in the hinge region. For example, a modified Fc for use in the context of the present disclosure may comprise a variant IgG1 Fc wherein at least one amino acid of the IgG1 Fc hinge region is replaced with the corresponding amino acid from the IgG2 Fc hinge region. Alternatively, a modified Fc for use in the context of the present disclosure may comprise a variant IgG4 Fc wherein at least one amino acid of the IgG4 Fc hinge region is replaced with the corresponding amino acid from the IgG2 Fc hinge region. Non-limiting, exemplary modified Fc regions that can be used in the context of the present disclosure are set forth in US Patent Application Publication No. 2014/0243504, the disclosure of which is hereby incorporated by reference in its entirety, as well as any functionally equivalent variants of the modified Fc regions set forth therein.

[0299] Also provided herein are antigen-binding proteins, antibodies or antigen-binding fragments, comprising a HCVR set forth herein and a chimeric heavy chain constant (CH) region, wherein the chimeric CH region comprises segments derived from the CH regions of more than one immunoglobulin isotype. For example, the antibodies of the disclosure may comprise a chimeric CH region comprising part or all of a CH2 domain derived from a human IgG1, human IgG2 or human IgG4 molecule, combined with part or all of a CH3 domain derived from a human IgG1, human IgG2 or human IgG4 molecule. According to certain embodiments, the antibodies provided herein comprise a chimeric CH region having a chimeric hinge region. For example, a chimeric hinge may comprise an “upper hinge” amino acid sequence (amino acid residues from positions 216 to 227 according to EU numbering) derived from a human IgG1, a human IgG2 or a human IgG4 hinge region, combined with a “lower hinge” sequence (amino acid residues from positions 228 to 236 according to EU numbering) derived from a human IgG1, a human IgG2 or a human IgG4 hinge region. According to certain embodiments, the chimeric hinge region comprises amino acid residues derived from a human IgG1 or a human IgG4 upper hinge and amino acid residues derived from a human IgG2 lower hinge. An antibody comprising a chimeric CH region as described herein may, in certain embodiments, exhibit modified Fc effector functions without adversely affecting the therapeutic or pharmacokinetic properties of the antibody. See, e.g., WO2014/022540.

[0300] Other modified Fc domains and Fc modifications that can be used in the context of the present disclosure include any of the modifications as set forth in US2014/0171623; U.S. Pat. No. 8,697,396; US2014/0134162; WO2014/043361, the disclosures of which are hereby incorporated by reference in their entireties. Methods of constructing antibodies or other antigen-binding fusion proteins comprising a modified Fc domain as described herein are known in the art.

[0301] In some embodiments, the anti-TfR antibodies and antigen-binding fragments described herein comprise an Fc domain comprising one or more mutations in the CH2 and/or CH3 regions that generate a separate TfR binding site.

[0302] In an embodiment, the CH2 region comprises one or more amino acid mutations, or a combination thereof, selected from the following: a) position 47 is Glu, Gly, Gln, Ser, Ala, Asn, Tyr, or Trp; position 49 is Ile, Val, Asp, Glu, Thr, Ala, or Tyr; position 56 is Asp, Pro, Met, Leu, Ala, Asn, or Phe; position 58 is Arg, Ser, Ala, or Gly; position 59 is Tyr, Trp, Arg, or Val; position 60 is Glu; position 61 is Trp or Tyr; position 62 is Gln, Tyr, His, Ile, Phe, Val, or Asp; and position 63 is Leu, Trp, Arg, Asn, Tyr, or Val; b) position 39 is Pro, Phe, Ala, Met, or Asp; position 40 is Gln, Pro, Arg, Lys, Ala, Ile, Leu, Glu, Asp, or Tyr; position 41 is Thr, Ser, Gly, Met, Val, Phe, Trp, or Leu; position 42 is Pro, Val, Ala, Thr, or Asp; position 43 is Pro, Val, or Phe; position 44 is Trp, Gln, Thr, or Glu; position 68 is Glu, Val, Thr, Leu, or Trp; position 70 is Tyr, His, Val, or Asp; position 71 is Thr, His, Gln, Arg, Asn, or Val; and position 72 is Tyr, Asn, Asp, Ser, or Pro; c) position 41 is Val or Asp; position 42 is Pro, Met, or Asp; position 43 is Pro or Trp; position 44 is Arg, Trp, Glu, or Thr; position 45 is Met, Tyr, or Trp; position 65 is Len or Trp; position 66 is Thr, Val, Ile, or Lys; position 67 is Ser, Lys, Ala, or Leu; position 69 is His, Leu, or Pro; and position 73 is Val or Trp; or d) position 45 is Trp, Val, Ile, or Ala; position 47 is Trp or Gly; position 49 is Tyr, Arg, or Glu; position 95 is Ser, Arg, or Gln; position 97 is Val, Ser, or Phe; position 99 is Ile, Ser, or Trp; position 102 is Trp, Thr, Ser, Arg, or Asp; position 103 is Trp; and position 104 is Ser, Lys, Arg, or Val; wherein the substitutions and the positions are determined with reference to amino acids 4-113 of

(SEQ ID NO: 763)
PCPAPELLGGPSVFLFPPKPKDTLMISRTPEVTCVVVDVSHEDPEVKFN
WYVDGVEVHNAKTKPREEQYNSTYRVVSVLTVLHQDWLNGKEYKCKVSN
KALPAPIEKTISKAKGQPREPQVYTLPPSRDELTKNQVSLTCLVKGFYP
SDIAVEWESNGQPENNYKTTPPVLDSDGSFFLYSKLTVDKSRWQQGNVF
SCSVMHEALHNHYTQKSLSLSPGK.

[0303] In an embodiment, the CH3 region comprises one or more amino acid mutations, or a combination thereof, selected from the following: position 153 is Trp, Leu, or Glu; position 157 is Tyr or Phe; position 159 is Thr; position 160 is Glu; position 161 is Trp; position 162 is Ser, Ala, Val, or Asn; position 163 is Ser or Asn; position 186 is Thr or Ser; position 188 is Glu or Ser; position 189 is Glu; and position 194 is Phe; or b) position 118 is Phe or Ile; position 119 is Asp, Glu, Gly, Ala, or Lys; position 120 is Tyr, Met, Leu, Ile, or Asp; position 122 is Thr or Ala; position 210 is Gly; position 211 is Phe; position 212 is His, Tyr, Ser, or Phe; and position 213 is Asp; wherein the substitutions and the positions are determined with reference to amino acids 114-220 of SEQ ID NO: 763.

[0304] In some embodiments, the CH3 region comprises one or more mutations, or a combination thereof, selected from the following: position 384 is Leu, Tyr, Met, or Val; position 386 is Leu, Thr, His, or Pro; position 387 is Val, Pro, or an acidic amino acid; position 388 is Trp; position 389 is Val, Ser, or Ala; position 413 is Glu, Ala, Ser, Leu, Thr, or Pro; position 416 is Thr or an acidic amino acid; and position 421 is Trp, Tyr, His, or Phe, according to EU numbering. In an embodiment, the CH3 region comprises one or more amino acid mutations, or a combination thereof, selected from the following: a) position 380 is Trp, Leu, or Glu; position 384 is Tyr or Phe; position 386 is Thr; position 387 is Glu; position 388 is Trp; position 389 is Ser, Ala, Val, or Asn; position 390 is Ser or Asn; position 413 is Thr or Ser; position 415 is Glu or Ser; position 416 is Glu; and position 421 is Phe.

[0305] In some embodiments, the CH3 region comprises one or more mutations, or a combination thereof, selected from the following: a) Phe at position 382, Tyr at position 383, Asp at position 384, Asp at position 385, Ser at position 386, Lys at position 387, Leu at position 388, Thr at position 389, Pro at position 419, Arg at position 420, Gly at position 421, Leu at position 422, Ala at position 424, Glu at position 426, Tyr at position 438, Leu at position 440, Gly at position 442, and Glu at position 443; b) Phe at position 382, Tyr at position 383, Gly at position 384, N at position 385, Ala at position 386, Lys at position 387, Thr at position 389, Leu at position 422, Ala at position 424, Glu at position 426, Tyr at position 438, Leu at position 440; c) Phe at position 382, Tyr at position 383, Glu at position 384, Ala at position 385, Lys at position 387, Leu at position 388, Leu at position 422, Ala at position 424, Glu at position 426, Tyr at position 438, Leu at position 440; d) Phe at position 382, Glu at position 384, Ser at position 386, Lys at position 387, Thr at position 389, Leu at position 422, Ala at position 424, Glu at position 426, Tyr at position 438, Leu at position 440; e) Phe at position 382, Gly at position 384, Ala at position 385, Lys at position 387, Ser at position 389, Leu at position 422, Ala at position 424, Glu at position 426, Tyr at position 438, Leu at position 440; f) Phe at position 382, Gly at position 384, Ala at position 385, Lys at position 387, Leu at position 388, Thr at position 389, Leu at position 422, Ala at position 424, Glu at position 426, Tyr at position 438, Leu at position 440; wherein the positions are determined according to EU numbering.

[0306] Additional mutations in CH2 and/or CH3 regions that can introduce non-native TfR binding sites into the antigen-binding proteins descried herein include those described in US Patent Application Publication Nos. 2020/0223935, 2020/0369746, 2021/0130485, 2022/0017634; and PCT Application Publications Nos. WO2023/279099, WO2023/114499 and WO2023/114510, which are incorporated herein by reference in their entireties.

[0307] The TfR-binding delivery domain coding sequences in the constructs disclosed herein may include one or more modifications such as codon optimization (e.g., to human codons), depletion of CpG dinucleotides, mutation of cryptic splice sites, addition of one or more glycosylation sites, or any combination thereof. CpG dinucleotides in a construct can limit the therapeutic utility of the construct. First, unmethylated CpG dinucleotides can interact with host toll-like receptor-9 (TLR-9) to stimulate innate, proinflammatory immune responses. Second, once the CpG dinucleotides become methylated, they can result in the suppression of transgene expression coordinated by methyl-CpG binding proteins. Cryptic splice sites are sequences in a pre-messenger RNA that are not normally used as splice sites, but that can be activated, for example, by mutations that either inactivate canonical splice sites or create splice sites where one did not exist before. Accurate splice site selection is critical for successful gene expression, and removal of cryptic splice sites can favor use of the normal or intended splice site.

[0308] In one example, a TfR-binding delivery domain coding sequence in a construct disclosed herein has one or more cryptic splice sites mutated or removed. In another example, a TfR-binding delivery domain coding sequence in a construct disclosed herein has all identified cryptic splice sites mutated or removed. In another example, a TfR-binding delivery domain coding sequence in a construct disclosed herein has one or more CpG dinucleotides removed (i.e., is CpG depleted). In another example, a TfR-binding delivery domain coding sequence in a construct disclosed herein has all CpG dinucleotides removed (i.e., is fully CpG depleted). In another example, a TfR-binding delivery domain coding sequence in a construct disclosed herein is codon optimized (e.g., codon optimized for expression in a human or mammal). In a specific example, a CDTfR63-binding delivery domain coding sequence in a construct disclosed herein has one or more CpG dinucleotides removed (i.e., is CpG depleted) and has one or more cryptic splice sites mutated or removed. In another specific example, a TfR-binding delivery domain coding sequence in a construct disclosed herein has all CpG dinucleotides removed and has one or more or all identified cryptic splice sites mutated or removed. In another specific example, a TfR-binding delivery domain coding sequence in a construct disclosed herein has one or more CpG dinucleotides removed (i.e., is CpG depleted) and is codon optimized (e.g., codon optimized for expression in a human or mammal). In another specific example, a TfR-binding delivery domain coding sequence in a construct disclosed herein has all CpG dinucleotides removed (i.e., is fully CpG depleted) and is codon optimized (e.g., codon optimized for expression in a human or mammal).

[0309] Various anti-TfR scFv coding sequences are provided. In one example, the anti-TfR scFv coding sequence encodes an anti-TfR scFv protein (or an anti-TfR scFv protein comprising a sequence) at least 90%, at least 91%, at least 92%, at least 93%, at least 94%, at least 95%, at least 96%, at least 97%, at least 98%, at least 99%, at least 99.5%, or 100% identical to any one of SEQ ID NOS: 492-523 (and, e.g., retaining TfR-binding activity). Optionally, the anti-TfR scFv coding sequence encodes an anti-TfR scFv protein (or an anti-TfR scFv protein comprising a sequence) at least 95%, at least 96%, at least 97%, at least 98%, at least 99%, at least 99.5%, or 100% identical to any one of SEQ ID NOS: 492-523 (and, e.g., retaining TfR-binding activity). Optionally, the anti-TfR scFv coding sequence in the above examples encodes an anti-TfR scFv protein (or an anti-TfR scFv protein comprising a sequence) at least 99%, at least 99.5%, or 100% identical to any one of SEQ ID NOS: 492-523 (and, e.g., retaining TfR-binding activity). Optionally, the anti-TfR scFv coding sequence in the above examples encodes an anti-TfR scFv protein comprising the sequence set forth in any one of SEQ ID NOS: 492-523. Optionally, the anti-TfR scFv coding sequence in the above examples encodes an anti-TfR scFv protein consisting essentially of the sequence set forth in any one of SEQ ID NOS: 492-523. Optionally, the anti-TfR scFv coding sequence in the above examples encodes an anti-TfR scFv protein consisting of the sequence set forth in any one of SEQ ID NOS: 492-523.

[0310] Various anti-TfR scFv coding sequences are provided. In one example, the anti-TfR scFv coding sequence is (or comprises a sequence) at least 90%, at least 91%, at least 92%, at least 93%, at least 94%, at least 95%, at least 96%, at least 97%, at least 98%, at least 99%, at least 99.5%, or 100% identical to any one of SEQ ID NOS: 524-536. In another example, the anti-TfR scFv coding sequence is (or comprises a sequence) at least 95%, at least 96%, at least 97%, at least 98%, at least 99%, at least 99.5%, or 100% identical to any one of SEQ ID NOS: 524-536. In another example, the anti-TfR scFv coding sequence is (or comprises a sequence) at least 99%, at least 99.5%, or 100% identical to any one of SEQ ID NOS: 524-536. In another example, the anti-TfR scFv coding sequence comprises the sequence set forth in any one of SEQ ID NOS: 524-536. In another example, the anti-TfR scFv coding sequence consists essentially of the sequence set forth in any one of SEQ ID NOS: 524-536. In another example, the anti-TfR scFv coding sequence consists of the sequence set forth in any one of SEQ ID NOS: 524-536. Optionally, the anti-TfR scFv coding sequence encodes an anti-TfR scFv protein (or an anti-TfR scFv protein comprising a sequence) at least 90%, at least 91%, at least 92%, at least 93%, at least 94%, at least 95%, at least 96%, at least 97%, at least 98%, at least 99%, at least 99.5%, or 100% identical to any one of SEQ ID NOS: 494, 503, 505, and 508 (and, e.g., retaining TfR-binding activity). Optionally, the anti-TfR scFv coding sequence encodes an anti-TfR scFv protein (or an anti-TfR scFv protein comprising a sequence) at least 95%, at least 96%, at least 97%, at least 98%, at least 99%, at least 99.5%, or 100% identical to any one of SEQ ID NOS: 494, 503, 505, and 508 (and, e.g., retaining TfR-binding activity). Optionally, the anti-TfR scFv coding sequence in the above examples encodes an anti-TfR scFv protein (or an anti-TfR scFv protein comprising a sequence) at least 99%, at least 99.5%, or 100% identical to any one of SEQ ID NOS: 494, 503, 505, and 508 (and, e.g., retaining TfR-binding activity). Optionally, the anti-TfR scFv coding sequence in the above examples encodes an anti-TfR scFv protein comprising the sequence set forth in any one of SEQ ID NOS: 494, 503, 505, and 508. Optionally, the anti-TfR scFv coding sequence in the above examples encodes an anti-TfR scFv protein consisting essentially of the sequence set forth in any one of SEQ ID NOS: 494, 503, 505, and 508. Optionally, the anti-TfR scFv coding sequence in the above examples encodes an anti-TfR scFv protein consisting of the sequence set forth in any one of SEQ ID NOS: 494, 503, 505, and 508.

[0311] Various anti-TfR scFv coding sequences are provided. In one example, the anti-TfR scFv coding sequence is (or comprises a sequence) at least 90%, at least 91%, at least 92%, at least 93%, at least 94%, at least 95%, at least 96%, at least 97%, at least 98%, at least 99%, at least 99.5%, or 100% identical to any one of SEQ ID NOS: 530-532 and 536. In another example, the anti-TfR scFv coding sequence is (or comprises a sequence) at least 95%, at least 96%, at least 97%, at least 98%, at least 99%, at least 99.5%, or 100% identical to any one of SEQ ID NOS: 530-532 and 536. In another example, the anti-TfR scFv coding sequence is (or comprises a sequence) at least 99%, at least 99.5%, or 100% identical to any one of SEQ ID NOS: 530-532 and 536. In another example, the anti-TfR scFv coding sequence comprises the sequence set forth in any one of SEQ ID NOS: 530-532 and 536. In another example, the anti-TfR scFv coding sequence consists essentially of the sequence set forth in any one of SEQ ID NOS: 530-532 and 536. In another example, the anti-TfR scFv coding sequence consists of the sequence set forth in any one of SEQ ID NOS: 530-532 and 536. Optionally, the anti-TfR scFv coding sequence encodes an anti-TfR scFv protein (or an anti-TfR scFv protein comprising a sequence) at least 90%, at least 91%, at least 92%, at least 93%, at least 94%, at least 95%, at least 96%, at least 97%, at least 98%, at least 99%, at least 99.5%, or 100% identical to SEQ ID NO: 508 (and, e.g., retaining TfR-binding activity). Optionally, the anti-TfR scFv coding sequence encodes an anti-TfR scFv protein (or an anti-TfR scFv protein comprising a sequence) at least 95%, at least 96%, at least 97%, at least 98%, at least 99%, at least 99.5%, or 100% identical to SEQ ID NO: 508 (and, e.g., retaining TfR-binding activity). Optionally, the anti-TfR scFv coding sequence in the above examples encodes an anti-TfR scFv protein (or an anti-TfR scFv protein comprising a sequence) at least 99%, at least 99.5%, or 100% identical to SEQ ID NO: 508 (and, e.g., retaining TfR-binding activity). Optionally, the anti-TfR scFv coding sequence in the above examples encodes an anti-TfR scFv protein comprising the sequence set forth in SEQ ID NO: 508. Optionally, the anti-TfR scFv coding sequence in the above examples encodes an anti-TfR scFv protein consisting essentially of the sequence set forth in SEQ ID NO: 508. Optionally, the anti-TfR scFv coding sequence in the above examples encodes an anti-TfR scFv protein consisting of the sequence set forth in SEQ ID NO: 508.

[0312] Various codon optimized anti-TfR scFv coding sequences are provided. The anti-TfR scFv coding sequence can be, for example, CpG-depleted (e.g., fully CpG depleted) and/or codon optimized (e.g., CpG depleted (e.g., fully CpG-depleted) and codon optimized). In one example, the anti-TfR scFv coding sequence is (or comprises a sequence) at least 90%, at least 91%, at least 92%, at least 93%, at least 94%, at least 95%, at least 96%, at least 97%, at least 98%, at least 99%, at least 99.5%, or 100% identical to any one of SEQ ID NOS: 524-532. In another example, the anti-TfR scFv coding sequence is (or comprises a sequence) at least 95%, at least 96%, at least 97%, at least 98%, at least 99%, at least 99.5%, or 100% identical to any one of SEQ ID NOS: 524-532. In another example, the anti-TfR scFv coding sequence is (or comprises a sequence) at least 99%, at least 99.5%, or 100% identical to any one of SEQ ID NOS: 524-532. In another example, the anti-TfR scFv coding sequence comprises the sequence set forth in any one of SEQ ID NOS: 524-532. In another example, the anti-TfR scFv coding sequence consists essentially of the sequence set forth in any one of SEQ ID NOS: 524-532. In another example, the anti-TfR scFv coding sequence consists of the sequence set forth in any one of SEQ ID NOS: 524-532. Optionally, the anti-TfR scFv coding sequence encodes an anti-TfR scFv protein (or an anti-TfR scFv protein comprising a sequence) at least 90%, at least 91%, at least 92%, at least 93%, at least 94%, at least 95%, at least 96%, at least 97%, at least 98%, at least 99%, at least 99.5%, or 100% identical to any one of SEQ ID NOS: 494, 503, 505, and 508 (and, e.g., retaining TfR-binding activity). Optionally, the anti-TfR scFv coding sequence encodes an anti-TfR scFv protein (or an anti-TfR scFv protein comprising a sequence) at least 95%, at least 96%, at least 97%, at least 98%, at least 99%, at least 99.5%, or 100% identical to any one of SEQ ID NOS: 494, 503, 505, and 508 (and, e.g., retaining TfR-binding activity). Optionally, the anti-TfR scFv coding sequence in the above examples encodes an anti-TfR scFv protein (or an anti-TfR scFv protein comprising a sequence) at least 99%, at least 99.5%, or 100% identical to any one of SEQ ID NOS: 494, 503, 505, and 508 (and, e.g., retaining TfR-binding activity). Optionally, the anti-TfR scFv coding sequence in the above examples encodes an anti-TfR scFv protein comprising the sequence set forth in any one of SEQ ID NOS: 494, 503, 505, and 508. Optionally, the anti-TfR scFv coding sequence in the above examples encodes an anti-TfR scFv protein consisting essentially of the sequence set forth in any one of SEQ ID NOS: 494, 503, 505, and 508. Optionally, the anti-TfR scFv coding sequence in the above examples encodes an anti-TfR scFv protein consisting of the sequence set forth in any one of SEQ ID NOS: 494, 503, 505, and 508.

[0313] Various codon optimized anti-TfR scFv coding sequences are provided. The anti-TfR scFv coding sequence can be, for example, CpG-depleted (e.g., fully CpG depleted) and/or codon optimized (e.g., CpG depleted (e.g., fully CpG-depleted) and codon optimized). In one example, the anti-TfR scFv coding sequence is (or comprises a sequence) at least 90%, at least 91%, at least 92%, at least 93%, at least 94%, at least 95%, at least 96%, at least 97%, at least 98%, at least 99%, at least 99.5%, or 100% identical to any one of SEQ ID NOS: 530-532. In another example, the anti-TfR scFv coding sequence is (or comprises a sequence) at least 95%, at least 96%, at least 97%, at least 98%, at least 99%, at least 99.5%, or 100% identical to any one of SEQ ID NOS: 530-532. In another example, the anti-TfR scFv coding sequence is (or comprises a sequence) at least 99%, at least 99.5%, or 100% identical to any one of SEQ ID NOS: 530-532. In another example, the anti-TfR scFv coding sequence comprises the sequence set forth in any one of SEQ ID NOS: 530-532. In another example, the anti-TfR scFv coding sequence consists essentially of the sequence set forth in any one of SEQ ID NOS: 530-532. In another example, the anti-TfR scFv coding sequence consists of the sequence set forth in any one of SEQ ID NOS: 530-532. Optionally, the anti-TfR scFv coding sequence encodes an anti-TfR scFv protein (or an anti-TfR scFv protein comprising a sequence) at least 90%, at least 91%, at least 92%, at least 93%, at least 94%, at least 95%, at least 96%, at least 97%, at least 98%, at least 99%, at least 99.5%, or 100% identical to SEQ ID NO: 508 (and, e.g., retaining TfR-binding activity). Optionally, the anti-TfR scFv coding sequence encodes an anti-TfR scFv protein (or an anti-TfR scFv protein comprising a sequence) at least 95%, at least 96%, at least 97%, at least 98%, at least 99%, at least 99.5%, or 100% identical to SEQ ID NO: 508 (and, e.g., retaining TfR-binding activity). Optionally, the anti-TfR scFv coding sequence in the above examples encodes an anti-TfR scFv protein (or an anti-TfR scFv protein comprising a sequence) at least 99%, at least 99.5%, or 100% identical to SEQ ID NO: 508 (and, e.g., retaining TfR-binding activity). Optionally, the anti-TfR scFv coding sequence in the above examples encodes an anti-TfR scFv protein comprising the sequence set forth in SEQ ID NO: 508. Optionally, the anti-TfR scFv coding sequence in the above examples encodes an anti-TfR scFv protein consisting essentially of the sequence set forth in SEQ ID NO: 508. Optionally, the anti-TfR scFv coding sequence in the above examples encodes an anti-TfR scFv protein consisting of the sequence set forth in SEQ ID NO: 508.

[0314] In one example, the anti-TfR scFv coding sequence is (or comprises a sequence) at least 90%, at least 91%, at least 92%, at least 93%, at least 94%, at least 95%, at least 96%, at least 97%, at least 98%, at least 99%, at least 99.5%, or 100% identical to SEQ ID NO: 530. In another example, the anti-TfR scFv coding sequence is (or comprises a sequence) at least 90%, at least 91%, at least 92%, at least 93%, at least 94%, at least 95%, at least 96%, at least 97%, at least 98%, at least 99%, at least 99.5%, or 100% identical to SEQ ID NO: 530 and encodes an anti-TfR scFv protein (or an anti-TfR scFv protein comprising a sequence) at least 99%, at least 99.5%, or 100% identical to SEQ ID NO: 508. In another example, the anti-TfR scFv coding sequence is (or comprises a sequence) at least 90%, at least 91%, at least 92%, at least 93%, at least 94%, at least 95%, at least 96%, at least 97%, at least 98%, at least 99%, at least 99.5%, or 100% identical to SEQ ID NO: 530 and encodes an anti-TfR scFv protein comprising the sequence set forth in SEQ ID NO: 508. In another example, the anti-TfR scFv coding sequence is (or comprises a sequence) at least 95%, at least 96%, at least 97%, at least 98%, at least 99%, at least 99.5%, or 100% identical to SEQ ID NO: 530. In another example, the anti-TfR scFv coding sequence is (or comprises a sequence) at least 95%, at least 96%, at least 97%, at least 98%, at least 99%, at least 99.5%, or 100% identical to SEQ ID NO: 530 and encodes an anti-TfR scFv protein (or an anti-TfR scFv protein comprising a sequence) at least 99%, at least 99.5%, or 100% identical to SEQ ID NO: 508. In another example, the anti-TfR scFv coding sequence is (or comprises a sequence) at least 95%, at least 96%, at least 97%, at least 98%, at least 99%, at least 99.5%, or 100% identical to SEQ ID NO: 530 and encodes an anti-TfR scFv protein comprising the sequence set forth in SEQ ID NO: 508. In another example, the anti-TfR scFv coding sequence is (or comprises a sequence) at least 99%, at least 99.5%, or 100% identical to SEQ ID NO: 530. In another example, the anti-TfR scFv coding sequence is (or comprises a sequence) at least 99%, at least 99.5%, or 100% identical to SEQ ID NO: 530 and encodes an anti-TfR scFv protein (or an anti-TfR scFv protein comprising a sequence) at least 99%, at least 99.5%, or 100% identical to SEQ ID NO: 508. In another example, the anti-TfR scFv coding sequence is (or comprises a sequence) at least 99%, at least 99.5%, or 100% identical to SEQ ID NO: 530 and encodes an anti-TfR scFv protein comprising the sequence set forth in SEQ ID NO: 508. In another example, the anti-TfR scFv coding sequence comprises the sequence set forth in SEQ ID NO: 530. In another example, the anti-TfR scFv coding sequence consists essentially of the sequence set forth in SEQ ID NO: 530. In another example, the anti-TfR scFv coding sequence consists of the sequence set forth in SEQ ID NO: 530. The anti-TfR coding sequence can be, for example, CpG-depleted (e.g., fully CpG-depleted) and/or codon optimized. For example, the anti-TfR scFv coding sequence can be CpG depleted (e.g., fully CpG-depleted) and codon optimized. Optionally, the anti-TfR scFv coding sequence encodes an anti-TfR scFv protein (or an anti-TfR scFv protein comprising a sequence) at least 90%, at least 91%, at least 92%, at least 93%, at least 94%, at least 95%, at least 96%, at least 97%, at least 98%, at least 99%, at least 99.5%, or 100% identical to SEQ ID NO: 508 (and, e.g., retaining TfR-binding activity). Optionally, the anti-TfR scFv coding sequence encodes an anti-TfR scFv protein (or an anti-TfR scFv protein comprising a sequence) at least 95%, at least 96%, at least 97%, at least 98%, at least 99%, at least 99.5%, or 100% identical to SEQ ID NO: 508 (and, e.g., retaining TfR-binding activity). Optionally, the anti-TfR scFv coding sequence in the above examples encodes an anti-TfR scFv protein (or an anti-TfR scFv protein comprising a sequence) at least 99%, at least 99.5%, or 100% identical to SEQ ID NO: 508 (and, e.g., retaining TfR-binding activity). Optionally, the anti-TfR scFv coding sequence in the above examples encodes an anti-TfR scFv protein comprising the sequence set forth in SEQ ID NO: 508. Optionally, the anti-TfR scFv coding sequence in the above examples encodes an anti-TfR scFv protein consisting essentially of the sequence set forth in SEQ ID NO: 508. Optionally, the anti-TfR scFv coding sequence in the above examples encodes an anti-TfR scFv protein consisting of the sequence set forth in SEQ ID NO: 508.

[0315] In one example, the anti-TfR scFv coding sequence is (or comprises a sequence) at least 90%, at least 91%, at least 92%, at least 93%, at least 94%, at least 95%, at least 96%, at least 97%, at least 98%, at least 99%, at least 99.5%, or 100% identical to SEQ ID NO: 531. In another example, the anti-TfR scFv coding sequence is (or comprises a sequence) at least 90%, at least 91%, at least 92%, at least 93%, at least 94%, at least 95%, at least 96%, at least 97%, at least 98%, at least 99%, at least 99.5%, or 100% identical to SEQ ID NO: 531 and encodes an anti-TfR scFv protein (or an anti-TfR scFv protein comprising a sequence) at least 99%, at least 99.5%, or 100% identical to SEQ ID NO: 508. In another example, the anti-TfR scFv coding sequence is (or comprises a sequence) at least 90%, at least 91%, at least 92%, at least 93%, at least 94%, at least 95%, at least 96%, at least 97%, at least 98%, at least 99%, at least 99.5%, or 100% identical to SEQ ID NO: 531 and encodes an anti-TfR scFv protein comprising the sequence set forth in SEQ ID NO: 508. In another example, the anti-TfR scFv coding sequence is (or comprises a sequence) at least 95%, at least 96%, at least 97%, at least 98%, at least 99%, at least 99.5%, or 100% identical to SEQ ID NO: 531. In another example, the anti-TfR scFv coding sequence is (or comprises a sequence) at least 95%, at least 96%, at least 97%, at least 98%, at least 99%, at least 99.5%, or 100% identical to SEQ ID NO: 531 and encodes an anti-TfR scFv protein (or an anti-TfR scFv protein comprising a sequence) at least 99%, at least 99.5%, or 100% identical to SEQ ID NO: 508. In another example, the anti-TfR scFv coding sequence is (or comprises a sequence) at least 95%, at least 96%, at least 97%, at least 98%, at least 99%, at least 99.5%, or 100% identical to SEQ ID NO: 531 and encodes an anti-TfR scFv protein comprising the sequence set forth in SEQ ID NO: 508. In another example, the anti-TfR scFv coding sequence is (or comprises a sequence) at least 99%, at least 99.5%, or 100% identical to SEQ ID NO: 531. In another example, the anti-TfR scFv coding sequence is (or comprises a sequence) at least 99%, at least 99.5%, or 100% identical to SEQ ID NO: 531 and encodes an anti-TfR scFv protein (or an anti-TfR scFv protein comprising a sequence) at least 99%, at least 99.5%, or 100% identical to SEQ ID NO: 508. In another example, the anti-TfR scFv coding sequence is (or comprises a sequence) at least 99%, at least 99.5%, or 100% identical to SEQ ID NO: 531 and encodes an anti-TfR scFv protein comprising the sequence set forth in SEQ ID NO: 508. In another example, the anti-TfR scFv coding sequence comprises the sequence set forth in SEQ ID NO: 531. In another example, the anti-TfR scFv coding sequence consists essentially of the sequence set forth in SEQ ID NO: 531. In another example, the anti-TfR scFv coding sequence consists of the sequence set forth in SEQ ID NO: 531. The anti-TfR coding sequence can be, for example, CpG-depleted (e.g., fully CpG-depleted) and/or codon optimized. For example, the anti-TfR scFv coding sequence can be CpG depleted (e.g., fully CpG-depleted) and codon optimized. Optionally, the anti-TfR scFv coding sequence encodes an anti-TfR scFv protein (or an anti-TfR scFv protein comprising a sequence) at least 90%, at least 91%, at least 92%, at least 93%, at least 94%, at least 95%, at least 96%, at least 97%, at least 98%, at least 99%, at least 99.5%, or 100% identical to SEQ ID NO: 508 (and, e.g., retaining TfR-binding activity). Optionally, the anti-TfR scFv coding sequence encodes an anti-TfR scFv protein (or an anti-TfR scFv protein comprising a sequence) at least 95%, at least 96%, at least 97%, at least 98%, at least 99%, at least 99.5%, or 100% identical to SEQ ID NO: 508 (and, e.g., retaining TfR-binding activity). Optionally, the anti-TfR scFv coding sequence in the above examples encodes an anti-TfR scFv protein (or an anti-TfR scFv protein comprising a sequence) at least 99%, at least 99.5%, or 100% identical to SEQ ID NO: 508 (and, e.g., retaining TfR-binding activity). Optionally, the anti-TfR scFv coding sequence in the above examples encodes an anti-TfR scFv protein comprising the sequence set forth in SEQ ID NO: 508. Optionally, the anti-TfR scFv coding sequence in the above examples encodes an anti-TfR scFv protein consisting essentially of the sequence set forth in SEQ ID NO: 508. Optionally, the anti-TfR scFv coding sequence in the above examples encodes an anti-TfR scFv protein consisting of the sequence set forth in SEQ ID NO: 508.

[0316] In one example, the anti-TfR scFv coding sequence is (or comprises a sequence) at least 90%, at least 91%, at least 92%, at least 93%, at least 94%, at least 95%, at least 96%, at least 97%, at least 98%, at least 99%, at least 99.5%, or 100% identical to SEQ ID NO: 532. In another example, the anti-TfR scFv coding sequence is (or comprises a sequence) at least 90%, at least 91%, at least 92%, at least 93%, at least 94%, at least 95%, at least 96%, at least 97%, at least 98%, at least 99%, at least 99.5%, or 100% identical to SEQ ID NO: 532 and encodes an anti-TfR scFv protein (or an anti-TfR scFv protein comprising a sequence) at least 99%, at least 99.5%, or 100% identical to SEQ ID NO: 508. In another example, the anti-TfR scFv coding sequence is (or comprises a sequence) at least 90%, at least 91%, at least 92%, at least 93%, at least 94%, at least 95%, at least 96%, at least 97%, at least 98%, at least 99%, at least 99.5%, or 100% identical to SEQ ID NO: 532 and encodes an anti-TfR scFv protein comprising the sequence set forth in SEQ ID NO: 508. In another example, the anti-TfR scFv coding sequence is (or comprises a sequence) at least 95%, at least 96%, at least 97%, at least 98%, at least 99%, at least 99.5%, or 100% identical to SEQ ID NO: 532. In another example, the anti-TfR scFv coding sequence is (or comprises a sequence) at least 95%, at least 96%, at least 97%, at least 98%, at least 99%, at least 99.5%, or 100% identical to SEQ ID NO: 532 and encodes an anti-TfR scFv protein (or an anti-TfR scFv protein comprising a sequence) at least 99%, at least 99.5%, or 100% identical to SEQ ID NO: 508. In another example, the anti-TfR scFv coding sequence is (or comprises a sequence) at least 95%, at least 96%, at least 97%, at least 98%, at least 99%, at least 99.5%, or 100% identical to SEQ ID NO: 532 and encodes an anti-TfR scFv protein comprising the sequence set forth in SEQ ID NO: 508. In another example, the anti-TfR scFv coding sequence is (or comprises a sequence) at least 99%, at least 99.5%, or 100% identical to SEQ ID NO: 532. In another example, the anti-TfR scFv coding sequence is (or comprises a sequence) at least 99%, at least 99.5%, or 100% identical to SEQ ID NO: 532 and encodes an anti-TfR scFv protein (or an anti-TfR scFv protein comprising a sequence) at least 99%, at least 99.5%, or 100% identical to SEQ ID NO: 508. In another example, the anti-TfR scFv coding sequence is (or comprises a sequence) at least 99%, at least 99.5%, or 100% identical to SEQ ID NO: 532 and encodes an anti-TfR scFv protein comprising the sequence set forth in SEQ ID NO: 508. In another example, the anti-TfR scFv coding sequence comprises the sequence set forth in SEQ ID NO: 532. In another example, the anti-TfR scFv coding sequence consists essentially of the sequence set forth in SEQ ID NO: 532. In another example, the anti-TfR scFv coding sequence consists of the sequence set forth in SEQ ID NO: 532. The anti-TfR coding sequence can be, for example, CpG-depleted (e.g., fully CpG-depleted) and/or codon optimized. For example, the anti-TfR scFv coding sequence can be CpG depleted (e.g., fully CpG-depleted) and codon optimized. Optionally, the anti-TfR scFv coding sequence encodes an anti-TfR scFv protein (or an anti-TfR scFv protein comprising a sequence) at least 90%, at least 91%, at least 92%, at least 93%, at least 94%, at least 95%, at least 96%, at least 97%, at least 98%, at least 99%, at least 99.5%, or 100% identical to SEQ ID NO: 508 (and, e.g., retaining TfR-binding activity). Optionally, the anti-TfR scFv coding sequence encodes an anti-TfR scFv protein (or an anti-TfR scFv protein comprising a sequence) at least 95%, at least 96%, at least 97%, at least 98%, at least 99%, at least 99.5%, or 100% identical to SEQ ID NO: 508 (and, e.g., retaining TfR-binding activity). Optionally, the anti-TfR scFv coding sequence in the above examples encodes an anti-TfR scFv protein (or an anti-TfR scFv protein comprising a sequence) at least 99%, at least 99.5%, or 100% identical to SEQ ID NO: 508 (and, e.g., retaining TfR-binding activity). Optionally, the anti-TfR scFv coding sequence in the above examples encodes an anti-TfR scFv protein comprising the sequence set forth in SEQ ID NO: 508. Optionally, the anti-TfR scFv coding sequence in the above examples encodes an anti-TfR scFv protein consisting essentially of the sequence set forth in SEQ ID NO: 508. Optionally, the anti-TfR scFv coding sequence in the above examples encodes an anti-TfR scFv protein consisting of the sequence set forth in SEQ ID NO: 508.

[0317] Various codon optimized anti-TfR scFv coding sequences are provided. The anti-TfR scFv coding sequence can be, for example, CpG-depleted (e.g., fully CpG depleted) and/or codon optimized (e.g., CpG depleted (e.g., fully CpG-depleted) and codon optimized). In one example, the anti-TfR scFv coding sequence is (or comprises a sequence) at least 90%, at least 91%, at least 92%, at least 93%, at least 94%, at least 95%, at least 96%, at least 97%, at least 98%, at least 99%, at least 99.5%, or 100% identical to any one of SEQ ID NOS: 527-529. In another example, the anti-TfR scFv coding sequence is (or comprises a sequence) at least 95%, at least 96%, at least 97%, at least 98%, at least 99%, at least 99.5%, or 100% identical to any one of SEQ ID NOS: 527-529. In another example, the anti-TfR scFv coding sequence is (or comprises a sequence) at least 99%, at least 99.5%, or 100% identical to any one of SEQ ID NOS: 527-529. In another example, the anti-TfR scFv coding sequence comprises the sequence set forth in any one of SEQ ID NOS: 527-529. In another example, the anti-TfR scFv coding sequence consists essentially of the sequence set forth in any one of SEQ ID NOS: 527-529. In another example, the anti-TfR scFv coding sequence consists of the sequence set forth in any one of SEQ ID NOS: 527-529. Optionally, the anti-TfR scFv coding sequence encodes an anti-TfR scFv protein (or an anti-TfR scFv protein comprising a sequence) at least 90%, at least 91%, at least 92%, at least 93%, at least 94%, at least 95%, at least 96%, at least 97%, at least 98%, at least 99%, at least 99.5%, or 100% identical to SEQ ID NO: 505 (and, e.g., retaining TfR-binding activity). Optionally, the anti-TfR scFv coding sequence encodes an anti-TfR scFv protein (or an anti-TfR scFv protein comprising a sequence) at least 95%, at least 96%, at least 97%, at least 98%, at least 99%, at least 99.5%, or 100% identical to SEQ ID NO: 505 (and, e.g., retaining TfR-binding activity). Optionally, the anti-TfR scFv coding sequence in the above examples encodes an anti-TfR scFv protein (or an anti-TfR scFv protein comprising a sequence) at least 99%, at least 99.5%, or 100% identical to SEQ ID NO: 505 (and, e.g., retaining TfR-binding activity). Optionally, the anti-TfR scFv coding sequence in the above examples encodes an anti-TfR scFv protein comprising the sequence set forth in SEQ ID NO: 505. Optionally, the anti-TfR scFv coding sequence in the above examples encodes an anti-TfR scFv protein consisting essentially of the sequence set forth in SEQ ID NO: 505. Optionally, the anti-TfR scFv coding sequence in the above examples encodes an anti-TfR scFv protein consisting of the sequence set forth in SEQ ID NO: 505.

[0318] In one example, the anti-TfR scFv coding sequence is (or comprises a sequence) at least 90%, at least 91%, at least 92%, at least 93%, at least 94%, at least 95%, at least 96%, at least 97%, at least 98%, at least 99%, at least 99.5%, or 100% identical to SEQ ID NO: 527. In another example, the anti-TfR scFv coding sequence is (or comprises a sequence) at least 90%, at least 91%, at least 92%, at least 93%, at least 94%, at least 95%, at least 96%, at least 97%, at least 98%, at least 99%, at least 99.5%, or 100% identical to SEQ ID NO: 527 and encodes an anti-TfR scFv protein (or an anti-TfR scFv protein comprising a sequence) at least 99%, at least 99.5%, or 100% identical to SEQ ID NO: 505. In another example, the anti-TfR scFv coding sequence is (or comprises a sequence) at least 90%, at least 91%, at least 92%, at least 93%, at least 94%, at least 95%, at least 96%, at least 97%, at least 98%, at least 99%, at least 99.5%, or 100% identical to SEQ ID NO: 527 and encodes an anti-TfR scFv protein comprising the sequence set forth in SEQ ID NO: 505. In another example, the anti-TfR scFv coding sequence is (or comprises a sequence) at least 95%, at least 96%, at least 97%, at least 98%, at least 99%, at least 99.5%, or 100% identical to SEQ ID NO: 527. In another example, the anti-TfR scFv coding sequence is (or comprises a sequence) at least 95%, at least 96%, at least 97%, at least 98%, at least 99%, at least 99.5%, or 100% identical to SEQ ID NO: 527 and encodes an anti-TfR scFv protein (or an anti-TfR scFv protein comprising a sequence) at least 99%, at least 99.5%, or 100% identical to SEQ ID NO: 505. In another example, the anti-TfR scFv coding sequence is (or comprises a sequence) at least 95%, at least 96%, at least 97%, at least 98%, at least 99%, at least 99.5%, or 100% identical to SEQ ID NO: 527 and encodes an anti-TfR scFv protein comprising the sequence set forth in SEQ ID NO: 505. In another example, the anti-TfR scFv coding sequence is (or comprises a sequence) at least 99%, at least 99.5%, or 100% identical to SEQ ID NO: 527. In another example, the anti-TfR scFv coding sequence is (or comprises a sequence) at least 99%, at least 99.5%, or 100% identical to SEQ ID NO: 527 and encodes an anti-TfR scFv protein (or an anti-TfR scFv protein comprising a sequence) at least 99%, at least 99.5%, or 100% identical to SEQ ID NO: 505. In another example, the anti-TfR scFv coding sequence is (or comprises a sequence) at least 99%, at least 99.5%, or 100% identical to SEQ ID NO: 527 and encodes an anti-TfR scFv protein comprising the sequence set forth in SEQ ID NO: 505. In another example, the anti-TfR scFv coding sequence comprises the sequence set forth in SEQ ID NO: 527. In another example, the anti-TfR scFv coding sequence consists essentially of the sequence set forth in SEQ ID NO: 527. In another example, the anti-TfR scFv coding sequence consists of the sequence set forth in SEQ ID NO: 527. The anti-TfR coding sequence can be, for example, CpG-depleted (e.g., fully CpG-depleted) and/or codon optimized. For example, the anti-TfR scFv coding sequence can be CpG depleted (e.g., fully CpG-depleted) and codon optimized. Optionally, the anti-TfR scFv coding sequence encodes an anti-TfR scFv protein (or an anti-TfR scFv protein comprising a sequence) at least 90%, at least 91%, at least 92%, at least 93%, at least 94%, at least 95%, at least 96%, at least 97%, at least 98%, at least 99%, at least 99.5%, or 100% identical to SEQ ID NO: 505 (and, e.g., retaining TfR-binding activity). Optionally, the anti-TfR scFv coding sequence encodes an anti-TfR scFv protein (or an anti-TfR scFv protein comprising a sequence) at least 95%, at least 96%, at least 97%, at least 98%, at least 99%, at least 99.5%, or 100% identical to SEQ ID NO: 505 (and, e.g., retaining TfR-binding activity). Optionally, the anti-TfR scFv coding sequence in the above examples encodes an anti-TfR scFv protein (or an anti-TfR scFv protein comprising a sequence) at least 99%, at least 99.5%, or 100% identical to SEQ ID NO: 505 (and, e.g., retaining TfR-binding activity). Optionally, the anti-TfR scFv coding sequence in the above examples encodes an anti-TfR scFv protein comprising the sequence set forth in SEQ ID NO: 505. Optionally, the anti-TfR scFv coding sequence in the above examples encodes an anti-TfR scFv protein consisting essentially of the sequence set forth in SEQ ID NO: 505. Optionally, the anti-TfR scFv coding sequence in the above examples encodes an anti-TfR scFv protein consisting of the sequence set forth in SEQ ID NO: 505.

[0319] In one example, the anti-TfR scFv coding sequence is (or comprises a sequence) at least 90%, at least 91%, at least 92%, at least 93%, at least 94%, at least 95%, at least 96%, at least 97%, at least 98%, at least 99%, at least 99.5%, or 100% identical to SEQ ID NO: 528. In another example, the anti-TfR scFv coding sequence is (or comprises a sequence) at least 90%, at least 91%, at least 92%, at least 93%, at least 94%, at least 95%, at least 96%, at least 97%, at least 98%, at least 99%, at least 99.5%, or 100% identical to SEQ ID NO: 528 and encodes an anti-TfR scFv protein (or an anti-TfR scFv protein comprising a sequence) at least 99%, at least 99.5%, or 100% identical to SEQ ID NO: 505. In another example, the anti-TfR scFv coding sequence is (or comprises a sequence) at least 90%, at least 91%, at least 92%, at least 93%, at least 94%, at least 95%, at least 96%, at least 97%, at least 98%, at least 99%, at least 99.5%, or 100% identical to SEQ ID NO: 528 and encodes an anti-TfR scFv protein comprising the sequence set forth in SEQ ID NO: 505. In another example, the anti-TfR scFv coding sequence is (or comprises a sequence) at least 95%, at least 96%, at least 97%, at least 98%, at least 99%, at least 99.5%, or 100% identical to SEQ ID NO: 528. In another example, the anti-TfR scFv coding sequence is (or comprises a sequence) at least 95%, at least 96%, at least 97%, at least 98%, at least 99%, at least 99.5%, or 100% identical to SEQ ID NO: 528 and encodes an anti-TfR scFv protein (or an anti-TfR scFv protein comprising a sequence) at least 99%, at least 99.5%, or 100% identical to SEQ ID NO: 505. In another example, the anti-TfR scFv coding sequence is (or comprises a sequence) at least 95%, at least 96%, at least 97%, at least 98%, at least 99%, at least 99.5%, or 100% identical to SEQ ID NO: 528 and encodes an anti-TfR scFv protein comprising the sequence set forth in SEQ ID NO: 505. In another example, the anti-TfR scFv coding sequence is (or comprises a sequence) at least 99%, at least 99.5%, or 100% identical to SEQ ID NO: 528. In another example, the anti-TfR scFv coding sequence is (or comprises a sequence) at least 99%, at least 99.5%, or 100% identical to SEQ ID NO: 528 and encodes an anti-TfR scFv protein (or an anti-TfR scFv protein comprising a sequence) at least 99%, at least 99.5%, or 100% identical to SEQ ID NO: 505. In another example, the anti-TfR scFv coding sequence is (or comprises a sequence) at least 99%, at least 99.5%, or 100% identical to SEQ ID NO: 528 and encodes an anti-TfR scFv protein comprising the sequence set forth in SEQ ID NO: 505. In another example, the anti-TfR scFv coding sequence comprises the sequence set forth in SEQ ID NO: 528. In another example, the anti-TfR scFv coding sequence consists essentially of the sequence set forth in SEQ ID NO: 528. In another example, the anti-TfR scFv coding sequence consists of the sequence set forth in SEQ ID NO: 528. The anti-TfR coding sequence can be, for example, CpG-depleted (e.g., fully CpG-depleted) and/or codon optimized. For example, the anti-TfR scFv coding sequence can be CpG depleted (e.g., fully CpG-depleted) and codon optimized. Optionally, the anti-TfR scFv coding sequence encodes an anti-TfR scFv protein (or an anti-TfR scFv protein comprising a sequence) at least 90%, at least 91%, at least 92%, at least 93%, at least 94%, at least 95%, at least 96%, at least 97%, at least 98%, at least 99%, at least 99.5%, or 100% identical to SEQ ID NO: 505 (and, e.g., retaining TfR-binding activity). Optionally, the anti-TfR scFv coding sequence encodes an anti-TfR scFv protein (or an anti-TfR scFv protein comprising a sequence) at least 95%, at least 96%, at least 97%, at least 98%, at least 99%, at least 99.5%, or 100% identical to SEQ ID NO: 505 (and, e.g., retaining TfR-binding activity). Optionally, the anti-TfR scFv coding sequence in the above examples encodes an anti-TfR scFv protein (or an anti-TfR scFv protein comprising a sequence) at least 99%, at least 99.5%, or 100% identical to SEQ ID NO: 505 (and, e.g., retaining TfR-binding activity). Optionally, the anti-TfR scFv coding sequence in the above examples encodes an anti-TfR scFv protein comprising the sequence set forth in SEQ ID NO: 505. Optionally, the anti-TfR scFv coding sequence in the above examples encodes an anti-TfR scFv protein consisting essentially of the sequence set forth in SEQ ID NO: 505. Optionally, the anti-TfR scFv coding sequence in the above examples encodes an anti-TfR scFv protein consisting of the sequence set forth in SEQ ID NO: 505.

[0320] In one example, the anti-TfR scFv coding sequence is (or comprises a sequence) at least 90%, at least 91%, at least 92%, at least 93%, at least 94%, at least 95%, at least 96%, at least 97%, at least 98%, at least 99%, at least 99.5%, or 100% identical to SEQ ID NO: 529. In another example, the anti-TfR scFv coding sequence is (or comprises a sequence) at least 90%, at least 91%, at least 92%, at least 93%, at least 94%, at least 95%, at least 96%, at least 97%, at least 98%, at least 99%, at least 99.5%, or 100% identical to SEQ ID NO: 529 and encodes an anti-TfR scFv protein (or an anti-TfR scFv protein comprising a sequence) at least 99%, at least 99.5%, or 100% identical to SEQ ID NO: 505. In another example, the anti-TfR scFv coding sequence is (or comprises a sequence) at least 90%, at least 91%, at least 92%, at least 93%, at least 94%, at least 95%, at least 96%, at least 97%, at least 98%, at least 99%, at least 99.5%, or 100% identical to SEQ ID NO: 529 and encodes an anti-TfR scFv protein comprising the sequence set forth in SEQ ID NO: 505. In another example, the anti-TfR scFv coding sequence is (or comprises a sequence) at least 95%, at least 96%, at least 97%, at least 98%, at least 99%, at least 99.5%, or 100% identical to SEQ ID NO: 529. In another example, the anti-TfR scFv coding sequence is (or comprises a sequence) at least 95%, at least 96%, at least 97%, at least 98%, at least 99%, at least 99.5%, or 100% identical to SEQ ID NO: 529 and encodes an anti-TfR scFv protein (or an anti-TfR scFv protein comprising a sequence) at least 99%, at least 99.5%, or 100% identical to SEQ ID NO: 505. In another example, the anti-TfR scFv coding sequence is (or comprises a sequence) at least 95%, at least 96%, at least 97%, at least 98%, at least 99%, at least 99.5%, or 100% identical to SEQ ID NO: 529 and encodes an anti-TfR scFv protein comprising the sequence set forth in SEQ ID NO: 505. In another example, the anti-TfR scFv coding sequence is (or comprises a sequence) at least 99%, at least 99.5%, or 100% identical to SEQ ID NO: 529. In another example, the anti-TfR scFv coding sequence is (or comprises a sequence) at least 99%, at least 99.5%, or 100% identical to SEQ ID NO: 529 and encodes an anti-TfR scFv protein (or an anti-TfR scFv protein comprising a sequence) at least 99%, at least 99.5%, or 100% identical to SEQ ID NO: 505. In another example, the anti-TfR scFv coding sequence is (or comprises a sequence) at least 99%, at least 99.5%, or 100% identical to SEQ ID NO: 529 and encodes an anti-TfR scFv protein comprising the sequence set forth in SEQ ID NO: 505. In another example, the anti-TfR scFv coding sequence comprises the sequence set forth in SEQ ID NO: 529. In another example, the anti-TfR scFv coding sequence consists essentially of the sequence set forth in SEQ ID NO: 529. In another example, the anti-TfR scFv coding sequence consists of the sequence set forth in SEQ ID NO: 529. The anti-TfR coding sequence can be, for example, CpG-depleted (e.g., fully CpG-depleted) and/or codon optimized. For example, the anti-TfR scFv coding sequence can be CpG depleted (e.g., fully CpG-depleted) and codon optimized. Optionally, the anti-TfR scFv coding sequence encodes an anti-TfR scFv protein (or an anti-TfR scFv protein comprising a sequence) at least 90%, at least 91%, at least 92%, at least 93%, at least 94%, at least 95%, at least 96%, at least 97%, at least 98%, at least 99%, at least 99.5%, or 100% identical to SEQ ID NO: 505 (and, e.g., retaining TfR-binding activity). Optionally, the anti-TfR scFv coding sequence encodes an anti-TfR scFv protein (or an anti-TfR scFv protein comprising a sequence) at least 95%, at least 96%, at least 97%, at least 98%, at least 99%, at least 99.5%, or 100% identical to SEQ ID NO: 505 (and, e.g., retaining TfR-binding activity). Optionally, the anti-TfR scFv coding sequence in the above examples encodes an anti-TfR scFv protein (or an anti-TfR scFv protein comprising a sequence) at least 99%, at least 99.5%, or 100% identical to SEQ ID NO: 505 (and, e.g., retaining TfR-binding activity). Optionally, the anti-TfR scFv coding sequence in the above examples encodes an anti-TfR scFv protein comprising the sequence set forth in SEQ ID NO: 505. Optionally, the anti-TfR scFv coding sequence in the above examples encodes an anti-TfR scFv protein consisting essentially of the sequence set forth in SEQ ID NO: 505. Optionally, the anti-TfR scFv coding sequence in the above examples encodes an anti-TfR scFv protein consisting of the sequence set forth in SEQ ID NO: 505.

[0321] Various codon optimized anti-TfR scFv coding sequences are provided. The anti-TfR scFv coding sequence can be, for example, CpG-depleted (e.g., fully CpG depleted) and/or codon optimized (e.g., CpG depleted (e.g., fully CpG-depleted) and codon optimized). In one example, the anti-TfR scFv coding sequence is (or comprises a sequence) at least 90%, at least 91%, at least 92%, at least 93%, at least 94%, at least 95%, at least 96%, at least 97%, at least 98%, at least 99%, at least 99.5%, or 100% identical to any one of SEQ ID NOS: 524-526. In another example, the anti-TfR scFv coding sequence is (or comprises a sequence) at least 95%, at least 96%, at least 97%, at least 98%, at least 99%, at least 99.5%, or 100% identical to any one of SEQ ID NOS: 524-526. In another example, the anti-TfR scFv coding sequence is (or comprises a sequence) at least 99%, at least 99.5%, or 100% identical to any one of SEQ ID NOS: 524-526. In another example, the anti-TfR scFv coding sequence comprises the sequence set forth in any one of SEQ ID NOS: 524-526. In another example, the anti-TfR scFv coding sequence consists essentially of the sequence set forth in any one of SEQ ID NOS: 524-526. In another example, the anti-TfR scFv coding sequence consists of the sequence set forth in any one of SEQ ID NOS: 524-526. Optionally, the anti-TfR scFv coding sequence encodes an anti-TfR scFv protein (or an anti-TfR scFv protein comprising a sequence) at least 90%, at least 91%, at least 92%, at least 93%, at least 94%, at least 95%, at least 96%, at least 97%, at least 98%, at least 99%, at least 99.5%, or 100% identical to SEQ ID NO: 494 (and, e.g., retaining TfR-binding activity). Optionally, the anti-TfR scFv coding sequence encodes an anti-TfR scFv protein (or an anti-TfR scFv protein comprising a sequence) at least 95%, at least 96%, at least 97%, at least 98%, at least 99%, at least 99.5%, or 100% identical to SEQ ID NO: 494 (and, e.g., retaining TfR-binding activity). Optionally, the anti-TfR scFv coding sequence in the above examples encodes an anti-TfR scFv protein (or an anti-TfR scFv protein comprising a sequence) at least 99%, at least 99.5%, or 100% identical to SEQ ID NO: 494 (and, e.g., retaining TfR-binding activity). Optionally, the anti-TfR scFv coding sequence in the above examples encodes an anti-TfR scFv protein comprising the sequence set forth in SEQ ID NO: 494. Optionally, the anti-TfR scFv coding sequence in the above examples encodes an anti-TfR scFv protein consisting essentially of the sequence set forth in SEQ ID NO: 494. Optionally, the anti-TfR scFv coding sequence in the above examples encodes an anti-TfR scFv protein consisting of the sequence set forth in SEQ ID NO: 494.

[0322] In one example, the anti-TfR scFv coding sequence is (or comprises a sequence) at least 90%, at least 91%, at least 92%, at least 93%, at least 94%, at least 95%, at least 96%, at least 97%, at least 98%, at least 99%, at least 99.5%, or 100% identical to SEQ ID NO: 524. In another example, the anti-TfR scFv coding sequence is (or comprises a sequence) at least 90%, at least 91%, at least 92%, at least 93%, at least 94%, at least 95%, at least 96%, at least 97%, at least 98%, at least 99%, at least 99.5%, or 100% identical to SEQ ID NO: 524 and encodes an anti-TfR scFv protein (or an anti-TfR scFv protein comprising a sequence) at least 99%, at least 99.5%, or 100% identical to SEQ ID NO: 494. In another example, the anti-TfR scFv coding sequence is (or comprises a sequence) at least 90%, at least 91%, at least 92%, at least 93%, at least 94%, at least 95%, at least 96%, at least 97%, at least 98%, at least 99%, at least 99.5%, or 100% identical to SEQ ID NO: 524 and encodes an anti-TfR scFv protein comprising the sequence set forth in SEQ ID NO: 494. In another example, the anti-TfR scFv coding sequence is (or comprises a sequence) at least 95%, at least 96%, at least 97%, at least 98%, at least 99%, at least 99.5%, or 100% identical to SEQ ID NO: 524. In another example, the anti-TfR scFv coding sequence is (or comprises a sequence) at least 95%, at least 96%, at least 97%, at least 98%, at least 99%, at least 99.5%, or 100% identical to SEQ ID NO: 524 and encodes an anti-TfR scFv protein (or an anti-TfR scFv protein comprising a sequence) at least 99%, at least 99.5%, or 100% identical to SEQ ID NO: 494. In another example, the anti-TfR scFv coding sequence is (or comprises a sequence) at least 95%, at least 96%, at least 97%, at least 98%, at least 99%, at least 99.5%, or 100% identical to SEQ ID NO: 524 and encodes an anti-TfR scFv protein comprising the sequence set forth in SEQ ID NO: 494. In another example, the anti-TfR scFv coding sequence is (or comprises a sequence) at least 99%, at least 99.5%, or 100% identical to SEQ ID NO: 524. In another example, the anti-TfR scFv coding sequence is (or comprises a sequence) at least 99%, at least 99.5%, or 100% identical to SEQ ID NO: 524 and encodes an anti-TfR scFv protein (or an anti-TfR scFv protein comprising a sequence) at least 99%, at least 99.5%, or 100% identical to SEQ ID NO: 494. In another example, the anti-TfR scFv coding sequence is (or comprises a sequence) at least 99%, at least 99.5%, or 100% identical to SEQ ID NO: 524 and encodes an anti-TfR scFv protein comprising the sequence set forth in SEQ ID NO: 494. In another example, the anti-TfR scFv coding sequence comprises the sequence set forth in SEQ ID NO: 524. In another example, the anti-TfR scFv coding sequence consists essentially of the sequence set forth in SEQ ID NO: 524. In another example, the anti-TfR scFv coding sequence consists of the sequence set forth in SEQ ID NO: 524. The anti-TfR coding sequence can be, for example, CpG-depleted (e.g., fully CpG-depleted) and/or codon optimized. For example, the anti-TfR scFv coding sequence can be CpG depleted (e.g., fully CpG-depleted) and codon optimized. Optionally, the anti-TfR scFv coding sequence encodes an anti-TfR scFv protein (or an anti-TfR scFv protein comprising a sequence) at least 90%, at least 91%, at least 92%, at least 93%, at least 94%, at least 95%, at least 96%, at least 97%, at least 98%, at least 99%, at least 99.5%, or 100% identical to SEQ ID NO: 494 (and, e.g., retaining TfR-binding activity). Optionally, the anti-TfR scFv coding sequence encodes an anti-TfR scFv protein (or an anti-TfR scFv protein comprising a sequence) at least 95%, at least 96%, at least 97%, at least 98%, at least 99%, at least 99.5%, or 100% identical to SEQ ID NO: 494 (and, e.g., retaining TfR-binding activity). Optionally, the anti-TfR scFv coding sequence in the above examples encodes an anti-TfR scFv protein (or an anti-TfR scFv protein comprising a sequence) at least 99%, at least 99.5%, or 100% identical to SEQ ID NO: 494 (and, e.g., retaining TfR-binding activity). Optionally, the anti-TfR scFv coding sequence in the above examples encodes an anti-TfR scFv protein comprising the sequence set forth in SEQ ID NO: 494. Optionally, the anti-TfR scFv coding sequence in the above examples encodes an anti-TfR scFv protein consisting essentially of the sequence set forth in SEQ ID NO: 494. Optionally, the anti-TfR scFv coding sequence in the above examples encodes an anti-TfR scFv protein consisting of the sequence set forth in SEQ ID NO: 494.

[0323] In one example, the anti-TfR scFv coding sequence is (or comprises a sequence) at least 90%, at least 91%, at least 92%, at least 93%, at least 94%, at least 95%, at least 96%, at least 97%, at least 98%, at least 99%, at least 99.5%, or 100% identical to SEQ ID NO: 525. In another example, the anti-TfR scFv coding sequence is (or comprises a sequence) at least 90%, at least 91%, at least 92%, at least 93%, at least 94%, at least 95%, at least 96%, at least 97%, at least 98%, at least 99%, at least 99.5%, or 100% identical to SEQ ID NO: 525 and encodes an anti-TfR scFv protein (or an anti-TfR scFv protein comprising a sequence) at least 99%, at least 99.5%, or 100% identical to SEQ ID NO: 494. In another example, the anti-TfR scFv coding sequence is (or comprises a sequence) at least 90%, at least 91%, at least 92%, at least 93%, at least 94%, at least 95%, at least 96%, at least 97%, at least 98%, at least 99%, at least 99.5%, or 100% identical to SEQ ID NO: 525 and encodes an anti-TfR scFv protein comprising the sequence set forth in SEQ ID NO: 494. In another example, the anti-TfR scFv coding sequence is (or comprises a sequence) at least 95%, at least 96%, at least 97%, at least 98%, at least 99%, at least 99.5%, or 100% identical to SEQ ID NO: 525. In another example, the anti-TfR scFv coding sequence is (or comprises a sequence) at least 95%, at least 96%, at least 97%, at least 98%, at least 99%, at least 99.5%, or 100% identical to SEQ ID NO: 525 and encodes an anti-TfR scFv protein (or an anti-TfR scFv protein comprising a sequence) at least 99%, at least 99.5%, or 100% identical to SEQ ID NO: 494. In another example, the anti-TfR scFv coding sequence is (or comprises a sequence) at least 95%, at least 96%, at least 97%, at least 98%, at least 99%, at least 99.5%, or 100% identical to SEQ ID NO: 525 and encodes an anti-TfR scFv protein comprising the sequence set forth in SEQ ID NO: 494. In another example, the anti-TfR scFv coding sequence is (or comprises a sequence) at least 99%, at least 99.5%, or 100% identical to SEQ ID NO: 525. In another example, the anti-TfR scFv coding sequence is (or comprises a sequence) at least 99%, at least 99.5%, or 100% identical to SEQ ID NO: 525 and encodes an anti-TfR scFv protein (or an anti-TfR scFv protein comprising a sequence) at least 99%, at least 99.5%, or 100% identical to SEQ ID NO: 494. In another example, the anti-TfR scFv coding sequence is (or comprises a sequence) at least 99%, at least 99.5%, or 100% identical to SEQ ID NO: 525 and encodes an anti-TfR scFv protein comprising the sequence set forth in SEQ ID NO: 494. In another example, the anti-TfR scFv coding sequence comprises the sequence set forth in SEQ ID NO: 525. In another example, the anti-TfR scFv coding sequence consists essentially of the sequence set forth in SEQ ID NO: 525. In another example, the anti-TfR scFv coding sequence consists of the sequence set forth in SEQ ID NO: 525. The anti-TfR coding sequence can be, for example, CpG-depleted (e.g., fully CpG-depleted) and/or codon optimized. For example, the anti-TfR scFv coding sequence can be CpG depleted (e.g., fully CpG-depleted) and codon optimized. Optionally, the anti-TfR scFv coding sequence encodes an anti-TfR scFv protein (or an anti-TfR scFv protein comprising a sequence) at least 90%, at least 91%, at least 92%, at least 93%, at least 94%, at least 95%, at least 96%, at least 97%, at least 98%, at least 99%, at least 99.5%, or 100% identical to SEQ ID NO: 494 (and, e.g., retaining TfR-binding activity). Optionally, the anti-TfR scFv coding sequence encodes an anti-TfR scFv protein (or an anti-TfR scFv protein comprising a sequence) at least 95%, at least 96%, at least 97%, at least 98%, at least 99%, at least 99.5%, or 100% identical to SEQ ID NO: 494 (and, e.g., retaining TfR-binding activity). Optionally, the anti-TfR scFv coding sequence in the above examples encodes an anti-TfR scFv protein (or an anti-TfR scFv protein comprising a sequence) at least 99%, at least 99.5%, or 100% identical to SEQ ID NO: 494 (and, e.g., retaining TfR-binding activity). Optionally, the anti-TfR scFv coding sequence in the above examples encodes an anti-TfR scFv protein comprising the sequence set forth in SEQ ID NO: 494. Optionally, the anti-TfR scFv coding sequence in the above examples encodes an anti-TfR scFv protein consisting essentially of the sequence set forth in SEQ ID NO: 494. Optionally, the anti-TfR scFv coding sequence in the above examples encodes an anti-TfR scFv protein consisting of the sequence set forth in SEQ ID NO: 494.

[0324] In one example, the anti-TfR scFv coding sequence is (or comprises a sequence) at least 90%, at least 91%, at least 92%, at least 93%, at least 94%, at least 95%, at least 96%, at least 97%, at least 98%, at least 99%, at least 99.5%, or 100% identical to SEQ ID NO: 526. In another example, the anti-TfR scFv coding sequence is (or comprises a sequence) at least 90%, at least 91%, at least 92%, at least 93%, at least 94%, at least 95%, at least 96%, at least 97%, at least 98%, at least 99%, at least 99.5%, or 100% identical to SEQ ID NO: 526 and encodes an anti-TfR scFv protein (or an anti-TfR scFv protein comprising a sequence) at least 99%, at least 99.5%, or 100% identical to SEQ ID NO: 494. In another example, the anti-TfR scFv coding sequence is (or comprises a sequence) at least 90%, at least 91%, at least 92%, at least 93%, at least 94%, at least 95%, at least 96%, at least 97%, at least 98%, at least 99%, at least 99.5%, or 100% identical to SEQ ID NO: 526 and encodes an anti-TfR scFv protein comprising the sequence set forth in SEQ ID NO: 494. In another example, the anti-TfR scFv coding sequence is (or comprises a sequence) at least 95%, at least 96%, at least 97%, at least 98%, at least 99%, at least 99.5%, or 100% identical to SEQ ID NO: 526. In another example, the anti-TfR scFv coding sequence is (or comprises a sequence) at least 95%, at least 96%, at least 97%, at least 98%, at least 99%, at least 99.5%, or 100% identical to SEQ ID NO: 526 and encodes an anti-TfR scFv protein (or an anti-TfR scFv protein comprising a sequence) at least 99%, at least 99.5%, or 100% identical to SEQ ID NO: 494. In another example, the anti-TfR scFv coding sequence is (or comprises a sequence) at least 95%, at least 96%, at least 97%, at least 98%, at least 99%, at least 99.5%, or 100% identical to SEQ ID NO: 526 and encodes an anti-TfR scFv protein comprising the sequence set forth in SEQ ID NO: 494. In another example, the anti-TfR scFv coding sequence is (or comprises a sequence) at least 99%, at least 99.5%, or 100% identical to SEQ ID NO: 526. In another example, the anti-TfR scFv coding sequence is (or comprises a sequence) at least 99%, at least 99.5%, or 100% identical to SEQ ID NO: 526 and encodes an anti-TfR scFv protein (or an anti-TfR scFv protein comprising a sequence) at least 99%, at least 99.5%, or 100% identical to SEQ ID NO: 494. In another example, the anti-TfR scFv coding sequence is (or comprises a sequence) at least 99%, at least 99.5%, or 100% identical to SEQ ID NO: 526 and encodes an anti-TfR scFv protein comprising the sequence set forth in SEQ ID NO: 494. In another example, the anti-TfR scFv coding sequence comprises the sequence set forth in SEQ ID NO: 526. In another example, the anti-TfR scFv coding sequence consists essentially of the sequence set forth in SEQ ID NO: 526. In another example, the anti-TfR scFv coding sequence consists of the sequence set forth in SEQ ID NO: 526. The anti-TfR coding sequence can be, for example, CpG-depleted (e.g., fully CpG-depleted) and/or codon optimized. For example, the anti-TfR scFv coding sequence can be CpG depleted (e.g., fully CpG-depleted) and codon optimized. Optionally, the anti-TfR scFv coding sequence encodes an anti-TfR scFv protein (or an anti-TfR scFv protein comprising a sequence) at least 90%, at least 91%, at least 92%, at least 93%, at least 94%, at least 95%, at least 96%, at least 97%, at least 98%, at least 99%, at least 99.5%, or 100% identical to SEQ ID NO: 494 (and, e.g., retaining TfR-binding activity). Optionally, the anti-TfR scFv coding sequence encodes an anti-TfR scFv protein (or an anti-TfR scFv protein comprising a sequence) at least 95%, at least 96%, at least 97%, at least 98%, at least 99%, at least 99.5%, or 100% identical to SEQ ID NO: 494 (and, e.g., retaining TfR-binding activity). Optionally, the anti-TfR scFv coding sequence in the above examples encodes an anti-TfR scFv protein (or an anti-TfR scFv protein comprising a sequence) at least 99%, at least 99.5%, or 100% identical to SEQ ID NO: 494 (and, e.g., retaining TfR-binding activity). Optionally, the anti-TfR scFv coding sequence in the above examples encodes an anti-TfR scFv protein comprising the sequence set forth in SEQ ID NO: 494. Optionally, the anti-TfR scFv coding sequence in the above examples encodes an anti-TfR scFv protein consisting essentially of the sequence set forth in SEQ ID NO: 494. Optionally, the anti-TfR scFv coding sequence in the above examples encodes an anti-TfR scFv protein consisting of the sequence set forth in SEQ ID NO: 494.

[0325] In one example, the anti-TfR scFv coding sequence is (or comprises a sequence) at least 90%, at least 91%, at least 92%, at least 93%, at least 94%, at least 95%, at least 96%, at least 97%, at least 98%, at least 99%, at least 99.5%, or 100% identical to SEQ ID NO: 812. In another example, the anti-TfR scFv coding sequence is (or comprises a sequence) at least 90%, at least 91%, at least 92%, at least 93%, at least 94%, at least 95%, at least 96%, at least 97%, at least 98%, at least 99%, at least 99.5%, or 100% identical to SEQ ID NO: 812 and encodes an anti-TfR scFv protein (or an anti-TfR scFv protein comprising a sequence) at least 99%, at least 99.5%, or 100% identical to SEQ ID NO: 813. In another example, the anti-TfR scFv coding sequence is (or comprises a sequence) at least 90%, at least 91%, at least 92%, at least 93%, at least 94%, at least 95%, at least 96%, at least 97%, at least 98%, at least 99%, at least 99.5%, or 100% identical to SEQ ID NO: 812 and encodes an anti-TfR scFv protein comprising the sequence set forth in SEQ ID NO: 813. In another example, the anti-TfR scFv coding sequence is (or comprises a sequence) at least 95%, at least 96%, at least 97%, at least 98%, at least 99%, at least 99.5%, or 100% identical to SEQ ID NO: 812. In another example, the anti-TfR scFv coding sequence is (or comprises a sequence) at least 95%, at least 96%, at least 97%, at least 98%, at least 99%, at least 99.5%, or 100% identical to SEQ ID NO: 812 and encodes an anti-TfR scFv protein (or an anti-TfR scFv protein comprising a sequence) at least 99%, at least 99.5%, or 100% identical to SEQ ID NO: 813. In another example, the anti-TfR scFv coding sequence is (or comprises a sequence) at least 95%, at least 96%, at least 97%, at least 98%, at least 99%, at least 99.5%, or 100% identical to SEQ ID NO: 812 and encodes an anti-TfR scFv protein comprising the sequence set forth in SEQ ID NO: 813. In another example, the anti-TfR scFv coding sequence is (or comprises a sequence) at least 99%, at least 99.5%, or 100% identical to SEQ ID NO: 812. In another example, the anti-TfR scFv coding sequence is (or comprises a sequence) at least 99%, at least 99.5%, or 100% identical to SEQ ID NO: 812 and encodes an anti-TfR scFv protein (or an anti-TfR scFv protein comprising a sequence) at least 99%, at least 99.5%, or 100% identical to SEQ ID NO: 813. In another example, the anti-TfR scFv coding sequence is (or comprises a sequence) at least 99%, at least 99.5%, or 100% identical to SEQ ID NO: 812 and encodes an anti-TfR scFv protein comprising the sequence set forth in SEQ ID NO: 813. In another example, the anti-TfR scFv coding sequence comprises the sequence set forth in SEQ ID NO: 812. In another example, the anti-TfR scFv coding sequence consists essentially of the sequence set forth in SEQ ID NO: 812. In another example, the anti-TfR scFv coding sequence consists of the sequence set forth in SEQ ID NO: 812. The anti-TfR coding sequence can be, for example, CpG-depleted (e.g., fully CpG-depleted) and/or codon optimized. For example, the anti-TfR scFv coding sequence can be CpG depleted (e.g., fully CpG-depleted) and codon optimized. Optionally, the anti-TfR scFv coding sequence encodes an anti-TfR scFv protein (or an anti-TfR scFv protein comprising a sequence) at least 90%, at least 91%, at least 92%, at least 93%, at least 94%, at least 95%, at least 96%, at least 97%, at least 98%, at least 99%, at least 99.5%, or 100% identical to SEQ ID NO: 813 (and, e.g., retaining TfR-binding activity). Optionally, the anti-TfR scFv coding sequence encodes an anti-TfR scFv protein (or an anti-TfR scFv protein comprising a sequence) at least 95%, at least 96%, at least 97%, at least 98%, at least 99%, at least 99.5%, or 100% identical to SEQ ID NO: 813 (and, e.g., retaining TfR-binding activity). Optionally, the anti-TfR scFv coding sequence in the above examples encodes an anti-TfR scFv protein (or an anti-TfR scFv protein comprising a sequence) at least 99%, at least 99.5%, or 100% identical to SEQ ID NO: 813 (and, e.g., retaining TfR-binding activity). Optionally, the anti-TfR scFv coding sequence in the above examples encodes an anti-TfR scFv protein comprising the sequence set forth in SEQ ID NO: 813. Optionally, the anti-TfR scFv coding sequence in the above examples encodes an anti-TfR scFv protein consisting essentially of the sequence set forth in SEQ ID NO: 813. Optionally, the anti-TfR scFv coding sequence in the above examples encodes an anti-TfR scFv protein consisting of the sequence set forth in SEQ ID NO: 813.

[0326] In another example, an anti-TfR Fab protein is used. In one example, the anti-TfR Fab coding sequence is (or comprises a sequence) at least 90%, at least 91%, at least 92%, at least 93%, at least 94%, at least 95%, at least 96%, at least 97%, at least 98%, at least 99%, at least 99.5%, or 100% identical to SEQ ID NO: 814. In another example, the anti-TfR Fab coding sequence is (or comprises a sequence) at least 90%, at least 91%, at least 92%, at least 93%, at least 94%, at least 95%, at least 96%, at least 97%, at least 98%, at least 99%, at least 99.5%, or 100% identical to SEQ ID NO: 814 and encodes an anti-TfR Fab protein (or an anti-TfR Fab protein comprising a sequence) at least 99%, at least 99.5%, or 100% identical to SEQ ID NO: 815. In another example, the anti-TfR Fab coding sequence is (or comprises a sequence) at least 90%, at least 91%, at least 92%, at least 93%, at least 94%, at least 95%, at least 96%, at least 97%, at least 98%, at least 99%, at least 99.5%, or 100% identical to SEQ ID NO: 814 and encodes an anti-TfR Fab protein comprising the sequence set forth in SEQ ID NO: 815. In another example, the anti-TfR Fab coding sequence is (or comprises a sequence) at least 95%, at least 96%, at least 97%, at least 98%, at least 99%, at least 99.5%, or 100% identical to SEQ ID NO: 814. In another example, the anti-TfR Fab coding sequence is (or comprises a sequence) at least 95%, at least 96%, at least 97%, at least 98%, at least 99%, at least 99.5%, or 100% identical to SEQ ID NO: 814 and encodes an anti-TfR Fab protein (or an anti-TfR Fab protein comprising a sequence) at least 99%, at least 99.5%, or 100% identical to SEQ ID NO: 815. In another example, the anti-TfR Fab coding sequence is (or comprises a sequence) at least 95%, at least 96%, at least 97%, at least 98%, at least 99%, at least 99.5%, or 100% identical to SEQ ID NO: 814 and encodes an anti-TfR Fab protein comprising the sequence set forth in SEQ ID NO: 815. In another example, the anti-TfR Fab coding sequence is (or comprises a sequence) at least 99%, at least 99.5%, or 100% identical to SEQ ID NO: 814. In another example, the anti-TfR Fab coding sequence is (or comprises a sequence) at least 99%, at least 99.5%, or 100% identical to SEQ ID NO: 814 and encodes an anti-TfR Fab protein (or an anti-TfR Fab protein comprising a sequence) at least 99%, at least 99.5%, or 100% identical to SEQ ID NO: 815. In another example, the anti-TfR Fab coding sequence is (or comprises a sequence) at least 99%, at least 99.5%, or 100% identical to SEQ ID NO: 814 and encodes an anti-TfR Fab protein comprising the sequence set forth in SEQ ID NO: 815. In another example, the anti-TfR Fab coding sequence comprises the sequence set forth in SEQ ID NO: 814. In another example, the anti-TfR Fab coding sequence consists essentially of the sequence set forth in SEQ ID NO: 814. In another example, the anti-TfR Fab coding sequence consists of the sequence set forth in SEQ ID NO: 814. The anti-TfR Fab coding sequence can be, for example, CpG-depleted (e.g., fully CpG-depleted) and/or codon optimized. For example, the anti-TfR Fab coding sequence can be CpG depleted (e.g., fully CpG-depleted) and codon optimized. Optionally, the anti-TfR Fab coding sequence encodes an anti-TfR Fab protein (or an anti-TfR Fab protein comprising a sequence) at least 90%, at least 91%, at least 92%, at least 93%, at least 94%, at least 95%, at least 96%, at least 97%, at least 98%, at least 99%, at least 99.5%, or 100% identical to SEQ ID NO: 815 (and, e.g., retaining TfR-binding activity). Optionally, the anti-TfR Fab coding sequence encodes an anti-TfR Fab protein (or an anti-TfR Fab protein comprising a sequence) at least 95%, at least 96%, at least 97%, at least 98%, at least 99%, at least 99.5%, or 100% identical to SEQ ID NO: 815 (and, e.g., retaining TfR-binding activity). Optionally, the anti-TfR Fab coding sequence in the above examples encodes an anti-TfR Fab protein (or an anti-TfR Fab protein comprising a sequence) at least 99%, at least 99.5%, or 100% identical to SEQ ID NO: 815 (and, e.g., retaining TfR-binding activity). Optionally, the anti-TfR Fab coding sequence in the above examples encodes an anti-TfR Fab protein comprising the sequence set forth in SEQ ID NO: 815. Optionally, the anti-TfR Fab coding sequence in the above examples encodes an anti-TfR Fab protein consisting essentially of the sequence set forth in SEQ ID NO: 815. Optionally, the anti-TfR Fab coding sequence in the above examples encodes an anti-TfR Fab protein consisting of the sequence set forth in SEQ ID NO: 815.

[0327] In one example, the anti-TfR Fab coding sequence is (or comprises a sequence) at least 90%, at least 91%, at least 92%, at least 93%, at least 94%, at least 95%, at least 96%, at least 97%, at least 98%, at least 99%, at least 99.5%, or 100% identical to SEQ ID NO: 816. In another example, the anti-TfR Fab coding sequence is (or comprises a sequence) at least 90%, at least 91%, at least 92%, at least 93%, at least 94%, at least 95%, at least 96%, at least 97%, at least 98%, at least 99%, at least 99.5%, or 100% identical to SEQ ID NO: 816 and encodes an anti-TfR Fab protein (or an anti-TfR Fab protein comprising a sequence) at least 99%, at least 99.5%, or 100% identical to SEQ ID NO: 817. In another example, the anti-TfR Fab coding sequence is (or comprises a sequence) at least 90%, at least 91%, at least 92%, at least 93%, at least 94%, at least 95%, at least 96%, at least 97%, at least 98%, at least 99%, at least 99.5%, or 100% identical to SEQ ID NO: 816 and encodes an anti-TfR Fab protein comprising the sequence set forth in SEQ ID NO: 817. In another example, the anti-TfR Fab coding sequence is (or comprises a sequence) at least 95%, at least 96%, at least 97%, at least 98%, at least 99%, at least 99.5%, or 100% identical to SEQ ID NO: 816. In another example, the anti-TfR Fab coding sequence is (or comprises a sequence) at least 95%, at least 96%, at least 97%, at least 98%, at least 99%, at least 99.5%, or 100% identical to SEQ ID NO: 816 and encodes an anti-TfR Fab protein (or an anti-TfR Fab protein comprising a sequence) at least 99%, at least 99.5%, or 100% identical to SEQ ID NO: 817. In another example, the anti-TfR Fab coding sequence is (or comprises a sequence) at least 95%, at least 96%, at least 97%, at least 98%, at least 99%, at least 99.5%, or 100% identical to SEQ ID NO: 816 and encodes an anti-TfR Fab protein comprising the sequence set forth in SEQ ID NO: 817. In another example, the anti-TfR Fab coding sequence is (or comprises a sequence) at least 99%, at least 99.5%, or 100% identical to SEQ ID NO: 816. In another example, the anti-TfR Fab coding sequence is (or comprises a sequence) at least 99%, at least 99.5%, or 100% identical to SEQ ID NO: 816 and encodes an anti-TfR Fab protein (or an anti-TfR Fab protein comprising a sequence) at least 99%, at least 99.5%, or 100% identical to SEQ ID NO: 817. In another example, the anti-TfR Fab coding sequence is (or comprises a sequence) at least 99%, at least 99.5%, or 100% identical to SEQ ID NO: 816 and encodes an anti-TfR Fab protein comprising the sequence set forth in SEQ ID NO: 817. In another example, the anti-TfR Fab coding sequence comprises the sequence set forth in SEQ ID NO: 816. In another example, the anti-TfR Fab coding sequence consists essentially of the sequence set forth in SEQ ID NO: 816. In another example, the anti-TfR Fab coding sequence consists of the sequence set forth in SEQ ID NO: 816. The anti-TfR Fab coding sequence can be, for example, CpG-depleted (e.g., fully CpG-depleted) and/or codon optimized. For example, the anti-TfR Fab coding sequence can be CpG depleted (e.g., fully CpG-depleted) and codon optimized. Optionally, the anti-TfR Fab coding sequence encodes an anti-TfR Fab protein (or an anti-TfR Fab protein comprising a sequence) at least 90%, at least 91%, at least 92%, at least 93%, at least 94%, at least 95%, at least 96%, at least 97%, at least 98%, at least 99%, at least 99.5%, or 100% identical to SEQ ID NO: 817 (and, e.g., retaining TfR-binding activity). Optionally, the anti-TfR Fab coding sequence encodes an anti-TfR Fab protein (or an anti-TfR Fab protein comprising a sequence) at least 95%, at least 96%, at least 97%, at least 98%, at least 99%, at least 99.5%, or 100% identical to SEQ ID NO: 817 (and, e.g., retaining TfR-binding activity). Optionally, the anti-TfR Fab coding sequence in the above examples encodes an anti-TfR Fab protein (or an anti-TfR Fab protein comprising a sequence) at least 99%, at least 99.5%, or 100% identical to SEQ ID NO: 817 (and, e.g., retaining TfR-binding activity). Optionally, the anti-TfR Fab coding sequence in the above examples encodes an anti-TfR Fab protein comprising the sequence set forth in SEQ ID NO: 817. Optionally, the anti-TfR Fab coding sequence in the above examples encodes an anti-TfR Fab protein consisting essentially of the sequence set forth in SEQ ID NO: 817. Optionally, the anti-TfR Fab coding sequence in the above examples encodes an anti-TfR Fab protein consisting of the sequence set forth in SEQ ID NO: 817.

[0328] When specific anti-TfR scFv or anti-TfR Fab or multidomain therapeutic protein nucleic acid constructs sequences are disclosed herein, they are meant to encompass the sequence disclosed or the reverse complement of the sequence. For example, if an anti-TfR scFv or anti-TfR Fab or multidomain therapeutic protein nucleic acid construct disclosed herein consists of the hypothetical sequence 5′-CTGGACCGA-3′, it is also meant to encompass the reverse complement of that sequence (5′-TCGGTCCAG-3′). Likewise, when construct elements are disclosed herein in a specific 5′ to 3′ order, they are also meant to encompass the reverse complement of the order of those elements. One reason for this is that, in many embodiments disclosed herein, the anti-TfR scFv or anti-TfR Fab or multidomain therapeutic protein nucleic acid constructs are part of a single-stranded recombinant AAV vector. Single-stranded AAV genomes are packaged as either sense (plus-stranded) or anti-sense (minus-stranded genomes), and single-stranded AAV genomes of + and − polarity are packaged with equal frequency into mature rAAV virions. See, e.g., LING et al. (2015) J. Mol. Genet. Med. 9(3):175, Zhou et al. (2008) Mol. Ther. 16(3):494-499, and Samulski et al. (1987) J. Virol. 61:3096-3101, each of which is herein incorporated by reference in its entirety for all purposes.

### (2) Bidirectional Constructs

[0329] The nucleic acid constructs disclosed herein can be bidirectional constructs. Such bidirectional constructs can allow for enhanced insertion and expression of encoded multidomain therapeutic protein. When used in combination with a nuclease agent (e.g., CRISPR/Cas system, zinc finger nuclease (ZFN) system; transcription activator-like effector nuclease (TALEN) system) as described herein, the bidirectionality of the nucleic acid construct allows the construct to be inserted in either direction (i.e., is not limited to insertion in one direction) within a target genomic locus or a cleavage site or target insertion site, allowing the expression of the multidomain therapeutic protein when inserted in either orientation, thereby enhancing expression efficiency.

[0330] A bidirectional construct as disclosed herein can comprise at least two nucleic acid segments, wherein a first segment comprises a first coding sequence for the multidomain therapeutic protein, and a second segment comprises the reverse complement of a second coding sequence for the multidomain therapeutic protein, or vice versa. However, other bidirectional constructs disclosed herein can comprise at least two nucleic acid segments, wherein the first segment comprises a coding sequence for a multidomain therapeutic protein, and the second segment comprises the reverse complement of a coding sequence for another protein, or vice versa. A reverse complement refers to a sequence that is a complement sequence of a reference sequence, wherein the complement sequence is written in the reverse orientation. For example, for a hypothetical sequence 5′-CTGGACCGA-3′, the perfect complement sequence is 3′-GACCTGGCT-5′, and the perfect reverse complement is written 5′-TCGGTCCAG-3′. A reverse complement sequence need not be perfect and may still encode the same polypeptide or a similar polypeptide as the reference sequence. Due to codon usage redundancy, a reverse complement can diverge from a reference sequence that encodes the same polypeptide. The coding sequences can optionally comprise one or more additional sequences, such as sequences encoding amino- or carboxy-terminal amino acid sequences such as a signal sequence, label sequence (e.g., HiBit), or heterologous functional sequence (e.g., nuclear localization sequence (NLS) or self-cleaving peptide) linked to the multidomain therapeutic protein or other protein.

[0331] When specific bidirectional construct sequences are disclosed herein, they are meant to encompass the sequence disclosed or the reverse complement of the sequence. For example, if a bidirectional construct disclosed herein consists of the hypothetical sequence 5′-CTGGACCGA-3′, it is also meant to encompass the reverse complement of that sequence (5′-TCGGTCCAG-3′). Likewise, when bidirectional construct elements are disclosed herein in a specific 5′ to 3′ order, they are also meant to encompass the reverse complement of the order of those elements. For example, if a bidirectional construct is disclosed herein that comprises from 5′ to 3′ a first splice acceptor, a first coding sequence, a first terminator, a reverse complement of a second terminator, a reverse complement of a second coding sequence, and a reverse complement of a second splice acceptor, it is also meant to encompass a construct comprising from 5′ to 3′ the second splice acceptor, the second coding sequence, the second terminator, a reverse complement of the first terminator, a reverse complement of the first coding sequence, and a reverse complement of the first splice acceptor. One reason for this is that, in many embodiments disclosed herein, the bidirectional constructs are part of a single-stranded recombinant AAV vector. Single-stranded AAV genomes are packaged as either sense (plus-stranded) or anti-sense (minus-stranded genomes), and single-stranded AAV genomes of + and -polarity are packaged with equal frequency into mature rAAV virions. See, e.g., LING et al. (2015) J. Mol. Genet. Med. 9(3):175, Zhou et al. (2008) Mol. Ther. 16(3):494-499, and Samulski et al. (1987) J. Virol. 61:3096-3101, each of which is herein incorporated by reference in its entirety for all purposes.

[0332] When the at least two segments both encode a multidomain therapeutic protein, the at least two segments can encode the same multidomain therapeutic protein or multidomain therapeutic protein. The different multidomain therapeutic proteins can be at least about 90%, at least about 95%, at least about 96%, at least about 97%, at least about 98%, at least about 99%, or at least about 99.5% identical. Preferably, the two segments encode the same multidomain therapeutic protein (i.e., 100% identical).

[0333] Even when the two segments encode the same multidomain therapeutic protein, the coding sequence for the multidomain therapeutic protein in the first segment can differ from the coding sequence for the multidomain therapeutic protein in the second segment. In some bidirectional constructs, the codon usage in the first coding sequence is the same as the codon usage in the second coding sequence. In other bidirectional constructs, the second coding sequence adopts a different codon usage from the codon usage of the first coding sequence in order to reduce hairpin formation. One or both of the coding sequences can be codon-optimized for expression in a host cell. In some bidirectional constructs, only one of the coding sequences is codon-optimized. In some bidirectional constructs, the first coding sequence is codon-optimized. In some bidirectional constructs, the second coding sequence is codon-optimized. In some bidirectional constructs, both coding sequences are codon-optimized. For example, the second multidomain therapeutic protein coding sequence can be codon optimized or may use one or more alternative codons for one or more amino acids of the same multidomain therapeutic protein (i.e., same amino acid sequence) encoded by the multidomain therapeutic protein coding sequence in the first segment. An alternative codon as used herein refers to variations in codon usage for a given amino acid, and may or may not be a preferred or optimized codon (codon optimized) for a given expression system. Preferred codon usage, or codons that are well-tolerated in a given system of expression are known.

[0334] In one example, the second segment comprises a reverse complement of a multidomain therapeutic protein coding sequence that adopts different codon usage from that of the multidomain therapeutic protein coding sequence in the first segment in order to reduce hairpin formation. Such a reverse complement forms base pairs with fewer than all nucleotides of the coding sequence in the first segment, yet it optionally encodes the same polypeptide. In one example, the reverse complement sequence in the second segment is not substantially complementary (e.g., not more than 70% complementary) to the coding sequence in the first segment. In other cases, however, the second segment comprises a reverse complement sequence that is highly complementary (e.g., at least 90% complementary) to the coding sequence in the first segment.

[0335] The second segment can have any percentage of complementarity to the first segment. For example, the second segment sequence can have at least about 30%, at least about 35%, at least about 40%, at least about 45%, at least about 50%, at least about 55%, at least about 60%, at least about 65%, at least about 70%, at least about 75%, at least about 80%, at least about 85%, at least about 90%, at least about 95%, at least about 97%, or at least about 99% complementarity to the first segment. As another example, the second segment sequence can have less than about 30%, less than about 35%, less than about 40%, less than about 45%, less than about 50%, less than about 55%, less than about 60%, less than about 65%, less than about 70%, less than about 75%, less than about 80%, less than about 85%, less than about 90%, less than about 95%, less than about 97%, or less than about 99% complementarity to the first segment. The reverse complement of the second coding sequence can be, in some nucleic acid constructs, not substantially complementary (e.g., not more than 70% complementary) to the first coding sequence, not substantially complementary to a fragment of the first coding sequence, highly complementary (e.g., at least 90% complementary) to the first coding sequence, highly complementary to a fragment of the first coding sequence, about 50% to about 80% identical to the reverse complement of the first coding sequence, or about 60% to about 100% identical to the reverse complement of the first coding sequence.

[0336] The bidirectional constructs disclosed herein can be modified to include any suitable structural feature as needed for any particular use and/or that confers one or more desired function. For example, the bidirectional nucleic acid constructs disclosed herein need not comprise a homology arm and/or can be, for example, homology-independent donor constructs. Owing in part to the bidirectional function of the nucleic acid constructs, the bidirectional constructs can be inserted into a genomic locus in either direction as described herein to allow for efficient insertion and/or expression of the multidomain therapeutic protein.

[0337] In some cases, the bidirectional nucleic acid construct does not comprise a promoter that drives the expression of the multidomain therapeutic protein. For example, the expression of the multidomain therapeutic protein can be driven by a promoter of the host cell (e.g., the endogenous ALB promoter when the transgene is integrated into a host cell's ALB locus). In other cases, the bidirectional nucleic acid construct can comprise one or more promoters operably linked to the coding sequences for the multidomain therapeutic protein. That is, although not required for expression, the constructs disclosed herein may also include transcriptional or translational regulatory sequences such as promoters, enhancers, insulators, internal ribosome entry sites, additional sequences encoding peptides, and/or polyadenylation signals. Some bidirectional constructs can comprise a promoter that drives expression of the first multidomain therapeutic protein coding sequence and/or the reverse complement of a promoter that drives expression of the reverse complement of the second multidomain therapeutic protein coding sequence.

[0338] The bidirectional constructs disclosed herein can be modified to include or exclude any suitable structural feature as needed for any particular use and/or that confers one or more desired functions. For example, some bidirectional nucleic acid constructs disclosed herein do not comprise a homology arm. Owing in part to the bidirectional function of the nucleic acid construct, the bidirectional construct can be inserted into a genomic locus in either direction (orientation) as described herein to allow for efficient insertion and/or expression of a multidomain therapeutic protein.

[0339] The bidirectional constructs can, in some cases, comprise one or more (e.g., two) polyadenylation tail sequences or polyadenylation signal sequences. In some bidirectional constructs, the first segment can comprise a polyadenylation signal sequence. In some bidirectional constructs, the second segment can comprise a polyadenylation signal sequence. In some bidirectional constructs, the first segment can comprise a first polyadenylation signal sequence, and the second segment can comprise a second polyadenylation signal sequence (e.g., a reverse complement of a polyadenylation signal sequence). In some bidirectional constructs, the first segment can comprise a first polyadenylation signal sequence located 3′ of the first coding sequence. In some bidirectional constructs, the second segment can comprise a reverse complement of a second polyadenylation signal sequence located 5′ of the reverse complement of the second coding sequence. In some bidirectional constructs, the first segment can comprise a first polyadenylation signal sequence located 3′ of the first coding sequence, and the second segment can comprise a reverse complement of a second polyadenylation signal sequence located 5′ of the reverse complement of the second coding sequence. The first and second polyadenylation signal sequences can be the same or different. In one example, the first and second polyadenylation signals are different. In a specific example, the first polyadenylation signal is a simian virus 40 (SV40) late polyadenylation signal (or a variant thereof), and the second polyadenylation signal is a bovine growth hormone (BGH) polyadenylation signal (or a variant thereof), or vice versa. For example, one polyadenylation signal can be an SV40 polyadenylation signal, and the other polyadenylation signal can be a BGH polyadenylation signal. In a specific example, one polyadenylation signal can comprise, consist essentially of, or consist of SEQ ID NO: 161, and the other polyadenylation signal can comprise, consist essentially of, or consist of SEQ ID NO: 162.

[0340] In one example, the polyadenylation signal can comprise a BGH polyadenylation signal. For example, the BGH polyadenylation signal can comprise, consist essentially of, or consist of SEQ ID NO: 797. In another example, the polyadenylation signal can comprise an SV40 polyadenylation signal. For example, the SV40 polyadenylation signal can be a unidirectional SV40 late polyadenylation signal. For example, the transcription terminator sequences that are present in the “early” inverse orientation of SV40 can be mutated (e.g., by mutating the reverse strand AAUAAA sequences to AAUCAA). The SV40 polyA is bidirectional, but the polyadenylation in the “late” orientation is more efficient than the polyadenylation in the “early” orientation. For example, the unidirectional SV40 late polyadenylation signal can comprise, consist essentially of, or consist of SEQ ID NO: 798. In another example, a synthetic polyadenylation signal can be used. For example, the synthetic polyadenylation signal can comprise, consist essentially of, or consist of SEQ ID NO: 799. In another example, two or more polyadenylation signals can be used in combination. For example, the polyadenylation signal can comprise a combination of a BGH polyadenylation signal and an SV40 polyadenylation signal (e.g., an SV40 late polyadenylation signal, such as a unidirectional SV40 late polyadenylation signal). For example, the polyadenylation signal can comprise a combination of a BGH polyadenylation signal and a unidirectional SV40 late polyadenylation signal. For example, the BGH polyadenylation signal can comprise, consist essentially of, or consist of SEQ ID NO: 797, and the unidirectional SV40 late polyadenylation signal can comprise, consist essentially of, or consist of SEQ ID NO: 798. In a specific example, the BGH polyadenylation signal can be upstream (5′) of the SV40 polyadenylation signal (e.g., unidirectional SV40 late polyadenylation signal). For example, the combined polyadenylation signal can comprise the sequence set forth in SEQ ID NO: 800. In another example, the polyadenylation signal can comprise a combination of a BGH polyadenylation signal and a synthetic polyadenylation signal. For example, the BGH polyadenylation signal can comprise, consist essentially of, or consist of SEQ ID NO: 797, and the synthetic polyadenylation signal can comprise, consist essentially of, or consist of SEQ ID NO: 799.

[0341] In some embodiments, a stuffer sequence can be used to increase the time between when RNA polymerase transcribes the polyA to the time when it transcribes the next splice acceptor. For example, the stuffer sequence can be used between two different polyadenylation signals (e.g., between a BGH polyadenylation signal and a synthetic polyadenylation signal. For example, the stuffer sequence can comprise, consist essentially of, or consist of SEQ ID NO: 801.

[0342] In some embodiments, MAZ elements that cause polymerase pausing are used in combination with a polyadenylation signal (e.g., a BGH polyadenylation signal or an SV40 polyadenylation signal). For example, one or more (e.g., at least 1, at least 2, at least 3, at least 4, or about 1 to about 4, about 2 to about 4, about 3 to about 4, or 1, 2, 3, or 4) MAZ elements can be used in combination with a polyadenylation signal. For example, the MAZ element can comprise, consist essentially of, or consist of SEQ ID NO: 802.

[0343] In some embodiments, unidirectional SV40 late polyadenylation signals are used. The SV40 polyA is bidirectional, but the polyadenylation in the “late” orientation is more efficient than the polyadenylation in the “early” orientation. The unidirectional SV40 late polyadenylation signals described herein are positioned in the “late” orientation, with the polyadenylation signals present in the “early” orientation mutated or inactivated. In some embodiments, each instance of the sequence AATAAA in the reverse strand is mutated in the unidirectional SV40 late polyadenylation signal. For example, the two conserved AATAAA poly(A) signals present in the SV40 “early” poly(A) to AATCAA. In some embodiments, the unidirectional SV40 late polyadenylation signal is at least 95%, at least 96%, at least 97%, at least 98%, or at least 99% identical to the sequence set forth in SEQ ID NO: 798. In some embodiments, the unidirectional SV40 late polyadenylation signal comprises, consists essentially of, or consists of the sequence set forth in SEQ ID NO: 798.

[0344] The unidirectional SV40 late polyadenylation signals can be used in combination with (e.g., in tandem with) one or more additional polyadenylation signals. Examples of transcription terminators that can be used include, for example, the human growth hormone (HGH) polyadenylation signal, the simian virus 40 (SV40) late polyadenylation signal, the rabbit beta-globin polyadenylation signal, the bovine growth hormone (BGH) polyadenylation signal, the phosphoglycerate kinase (PGK) polyadenylation signal, an AOX1 transcription termination sequence, a CYC1 transcription termination sequence, or any transcription termination sequence known to be suitable for regulating gene expression in eukaryotic cells. For example, the unidirectional SV40 late polyadenylation signals can be used in combination with (e.g., in tandem with) a bovine growth hormone (BGH) polyadenylation signal, optionally wherein the BGH polyadenylation signal is upstream of (5′ of) the unidirectional SV40 late polyadenylation signal. In some embodiments, the BGH polyadenylation signal is at least 95%, at least 96%, at least 97%, at least 98%, or at least 99% identical to the sequence set forth in SEQ ID NO: 797. In some embodiments, the BGH polyadenylation signal comprises, consists essentially of, or consists of the sequence set forth in SEQ ID NO: 797. In some embodiments, the combination of the BGH polyadenylation signal and the unidirectional SV40 late polyadenylation signal is at least 95%, at least 96%, at least 97%, at least 98%, or at least 99% identical to the sequence set forth in SEQ ID NO: 800. In some embodiments, the combination of the BGH polyadenylation signal and the unidirectional SV40 late polyadenylation signal comprises, consists essentially of, or consists of the sequence set forth in SEQ ID NO: 800.

[0345] In some embodiments, a stuffer sequence can be used to increase the time between when RNA polymerase transcribes the polyA to the time when it transcribes the next splice acceptor. For example, the stuffer sequence can be used between two different polyadenylation signals (e.g., between a BGH polyadenylation signal and a synthetic polyadenylation signal. For example, the stuffer sequence can comprise, consist essentially of, or consist of SEQ ID NO: 801.

[0346] In some embodiments, MAZ elements that cause polymerase pausing are used in combination with a polyadenylation signal (e.g., a BGH polyadenylation signal or an SV40 polyadenylation signal). For example, one or more (e.g., at least 1, at least 2, at least 3, at least 4, or about 1 to about 4, about 2 to about 4, about 3 to about 4, or 1, 2, 3, or 4) MAZ elements can be used in combination with a polyadenylation signal. For example, the MAZ element can comprise, consist essentially of, or consist of SEQ ID NO: 802.

[0347] In some bidirectional constructs, both the first segment and the second segment comprise a polyadenylation tail sequence. Methods of designing a suitable polyadenylation tail sequence are known. For example, in some bidirectional constructs, one or both of the first and second segment comprises a polyadenylation tail sequence and/or a polyadenylation signal sequence downstream of an open reading frame (i.e., a polyadenylation tail sequence and/or a polyadenylation signal sequence 3′ of a coding sequence, or a reverse complement of a polyadenylation tail sequence and/or a polyadenylation signal sequence 5′ of a reverse complement of a coding sequence). The polyadenylation tail sequence can be encoded, for example, as a “poly-A” stretch downstream of the multidomain therapeutic protein coding sequence (or other protein coding sequence) in the first and/or second segment. A poly-A tail can comprise, for example, at least 20, 30, 40, 50, 60, 70, 80, 90, or 100 adenines, and optionally up to 300 adenines. In a specific example, the poly-A tail comprises 95, 96, 97, 98, 99, or 100 adenine nucleotides. Methods of designing a suitable polyadenylation tail sequence and/or polyadenylation signal sequence are well known. For example, the polyadenylation signal sequence AAUAAA is commonly used in mammalian systems, although variants such as UAUAAA or AU/GUAAA have been identified. See, e.g., Proudfoot (2011) Genes & Dev. 25(17):1770-82, herein incorporated by reference in its entirety for all purposes. In some bidirectional constructs, a single bidirectional terminator can be used to terminate RNA polymerase transcription in either the sense or the antisense direction (i.e., to terminate RNA polymerase transcription from both the first segment and the second segment). Examples of bidirectional terminators include the ARO4, TRP1, TRP4, ADH1, CYC1, GAL1, GAL7, and GAL10 terminators.

[0348] The bidirectional constructs can, in some cases, comprise one or more (e.g., two) splice acceptor sites. In some bidirectional constructs, the first segment can comprise a splice acceptor site. In some bidirectional constructs, the second segment can comprise a splice acceptor site. In some bidirectional constructs, the first segment can comprise a first splice acceptor site, and the second segment can comprise a second splice acceptor site (e.g., a reverse complement of a splice acceptor site). In some bidirectional constructs, the first segment comprises a first splice acceptor site located 5′ of the first coding sequence. In some bidirectional constructs, the second segment comprises a reverse complement of a second splice acceptor site located 3′ of the reverse complement of the second coding sequence. In some bidirectional constructs, the first segment comprises a first splice acceptor site located 5′ of the first coding sequence, and the second segment comprises a reverse complement of a second splice acceptor site located 3′ of the reverse complement of the second coding sequence. The first and second splice acceptor sites can be the same or different. In a specific example, both splice acceptors are mouse Alb exon 2 splice acceptors. In a specific example, both splice acceptors can comprise, consist essentially of, or consist of SEQ ID NO: 163.

[0349] A bidirectional construct may comprise a first coding sequence that encodes a first coding sequence linked to a splice acceptor and a reverse complement of a second coding sequence operably linked to the reverse complement of a splice acceptor. The bidirectional constructs disclosed herein can also comprise a splice acceptor site on either or both ends of the construct, or splice acceptor sites in both the first segment and the second segment (e.g., a splice acceptor site 5′ of a coding sequence, or a reverse complement of a splice acceptor 3′ of a reverse complement of a coding sequence). The splice acceptor site can, for example, comprise NAG or consist of NAG. In a specific example, the splice acceptor is an ALB splice acceptor (e.g., an ALB splice acceptor used in the splicing together of exons 1 and 2 of ALB (i.e., ALB exon 2 splice acceptor)). For example, such a splice acceptor can be derived from the human ALB gene. In another example, the splice acceptor can be derived from the mouse Alb gene (e.g., an ALB splice acceptor used in the splicing together of exons 1 and 2 of mouse Alb (i.e., mouse Alb exon 2 splice acceptor)). In another example, the splice acceptor is a splice acceptor from a gene encoding the multidomain therapeutic protein. Additional suitable splice acceptor sites useful in eukaryotes, including artificial splice acceptors, are known. See, e.g., Shapiro et al. (1987) Nucleic Acids Res. 15:7155-7174 and Burset et al. (2001) Nucleic Acids Res. 29:255-259, each of which is herein incorporated by reference in its entirety for all purposes. The splice acceptors used in a bidirectional construct may be the same or different. In a specific example, both splice acceptors are mouse Alb exon 2 splice acceptors.

[0350] The bidirectional constructs can be circular or linear. For example, a bidirectional construct can be linear. The first and second segments can be joined in a linear manner through a linker sequence. For example, the 5′ end of the second segment that comprises a reverse complement sequence can be linked to the 3′ end of the first segment. Alternatively, the 5′ end of the first segment can be linked to the 3′ end of the second segment that comprises a reverse complement sequence. The linker can be any suitable length. For example, the linker can be between about 5 to about 2000 nucleotides in length. As an example, the linker sequence can be about 1, about 2, about 3, about 4, about 5, about 6, about 7, about 8, about 9, about 10, about 11, about 12, about 13, about 14, about 15, about 16, about 17, about 18, about 19, about 20, about 25, about 30, about 35, about 40, about 45, about 50, about 55, about 60, about 65, about 70, about 75, about 80, about 85, about 90, about 95, about 100, about 150, about 200, about 250, about 300, about 500, about 1000, about 1500, about 2000, or more nucleotides in length. Other structural elements in addition to, or instead of, a linker sequence, can also be inserted between the first and second segments.

[0351] The bidirectional constructs disclosed herein can be DNA or RNA, single-stranded, double-stranded, or partially single-stranded and partially double-stranded. For example, the constructs can be single- or double-stranded DNA. In some embodiments, the nucleic acid can be modified (e.g., using nucleoside analogs), as described herein. In a specific example, the bidirectional construct is single-stranded (e.g., single-stranded DNA).

[0352] The bidirectional constructs disclosed herein can be modified on either or both ends to include one or more suitable structural features as needed and/or to confer one or more functional benefit. For example, structural modifications can vary depending on the method(s) used to deliver the constructs disclosed herein to a host cell (e.g., use of viral vector delivery or packaging into lipid nanoparticles for delivery). Such modifications include, for example, terminal structures such as inverted terminal repeats (ITR), hairpin, loops, and other structures such as toroids. For example, the constructs disclosed herein can comprise one, two, or three ITRs or can comprise no more than two ITRs. Various methods of structural modifications are known.

[0353] Similarly, one or both ends of the construct can be protected (e.g., from exonucleolytic degradation) by known methods. For example, one or more dideoxynucleotide residues can be added to the 3′ terminus of a linear molecule and/or self-complementary oligonucleotides can be ligated to one or both ends. See, e.g., Chang et al. (1987) Proc. Natl. Acad. Sci. U.S.A. 84:4959-4963 and Nehls et al. (1996) Science 272:886-889, each of which is herein incorporated by reference in its entirety for all purposes. Additional methods for protecting the constructs from degradation include, but are not limited to, addition of terminal amino group(s) and the use of modified internucleotide linkages such as, for example, phosphorothioates, phosphoramidates, and O-methyl ribose or deoxyribose residues.

[0354] As disclosed in more detail herein, the bidirectional constructs disclosed herein can be introduced into a cell as part of a vector having additional sequences such as, for example, replication origins, promoters, and genes encoding antibiotic resistance. The constructs can be introduced as a naked nucleic acid, can be introduced as a nucleic acid complexed with an agent such as a liposome, polymer, or poloxamer, or can be delivered by viral vectors (e.g., adenovirus, AAV, herpesvirus, retrovirus, lentivirus).

[0355] In an exemplary bidirectional construct, the second segment is located 3′ of the first segment, the first multidomain therapeutic protein coding sequence and the second multidomain therapeutic protein coding sequence both encode the same multidomain therapeutic protein, the second multidomain therapeutic protein coding sequence adopts a different codon usage from the codon usage of the first multidomain therapeutic protein coding sequence, the first segment comprises a first polyadenylation signal sequence located 3′ of the first multidomain therapeutic protein coding sequence, the second segment comprises a reverse complement of a second polyadenylation signal sequence located 5′ of the reverse complement of the second multidomain therapeutic protein coding sequence, the first segment comprises a first splice acceptor site located 5′ of the first multidomain therapeutic protein coding sequence, the second segment comprises a reverse complement of a second splice acceptor site located 3′ of the reverse complement of the second multidomain therapeutic protein coding sequence, the nucleic acid construct does not comprise a promoter that drives expression of the first multidomain therapeutic protein or the second multidomain therapeutic protein, and optionally the nucleic acid construct does not comprise a homology arm.

### (3) Unidirectional Constructs

[0356] The nucleic acid constructs disclosed herein can be unidirectional constructs. When specific unidirectional construct sequences are disclosed herein, they are meant to encompass the sequence disclosed or the reverse complement of the sequence. For example, if a unidirectional construct disclosed herein consists of the hypothetical sequence 5′-CTGGACCGA-3′, it is also meant to encompass the reverse complement of that sequence (5′-TCGGTCCAG-3′). Likewise, when unidirectional construct elements are disclosed herein in a specific 5′ to 3′ order, they are also meant to encompass the reverse complement of the order of those elements. One reason for this is that, in many embodiments disclosed herein, the unidirectional constructs are part of a single-stranded recombinant AAV vector. Single-stranded AAV genomes are packaged as either sense (plus-stranded) or anti-sense (minus-stranded genomes), and single-stranded AAV genomes of + and −polarity are packaged with equal frequency into mature rAAV virions. See, e.g., LING et al. (2015) J. Mol. Genet. Med. 9(3):175, Zhou et al. (2008) Mol. Ther. 16(3):494-499, and Samulski et al. (1987) J. Virol. 61:3096-3101, each of which is herein incorporated by reference in its entirety for all purposes.

[0357] In the unidirectional constructs, the coding sequence for the multidomain therapeutic protein can be codon-optimized for expression in a host cell. For example, the coding sequence can be codon optimized or may use one or more alternative codons for one or more amino acids of the multidomain therapeutic protein (i.e., same amino acid sequence). An alternative codon as used herein refers to variations in codon usage for a given amino acid, and may or may not be a preferred or optimized codon (codon optimized) for a given expression system. Preferred codon usage, or codons that are well-tolerated in a given system of expression, are known.

[0358] The unidirectional constructs disclosed herein can be modified to include any suitable structural feature as needed for any particular use and/or that confers one or more desired functions. For example, the unidirectional nucleic acid constructs disclosed herein need not comprise a homology arm and/or can be, for example, homology-independent donor constructs.

[0359] In some cases, the unidirectional nucleic acid construct does not comprise a promoter that drives the expression of multidomain therapeutic protein. For example, the expression of the multidomain therapeutic protein can be driven by a promoter of the host cell (e.g., the endogenous ALB promoter when the transgene is integrated into a host cell's ALB locus). In other cases, the unidirectional nucleic acid construct can comprise one or more promoters operably linked to the coding sequence for the multidomain therapeutic protein. That is, although not required for expression, the constructs disclosed herein may also include transcriptional or translational regulatory sequences such as promoters, enhancers, insulators, internal ribosome entry sites, additional sequences encoding peptides, and/or polyadenylation signals. Some unidirectional constructs can comprise a promoter that drives expression of the coding sequence for the multidomain therapeutic protein.

[0360] The unidirectional constructs can, in some cases, comprise one or more polyadenylation tail sequences or polyadenylation signal sequences. Some unidirectional constructs can comprise a polyadenylation signal sequence located 3′ of the coding sequence for the multidomain therapeutic protein. In a specific example, the polyadenylation signal is a simian virus 40 (SV40) late polyadenylation signal (or a variant thereof). In another specific example, the polyadenylation signal is a bovine growth hormone (BGH) polyadenylation signal (or a variant thereof). In another specific example, the polyadenylation signal is a BGH polyadenylation signal. For example, the polyadenylation signal can be an SV40 polyadenylation signal or a BGH polyadenylation signal. In a specific example, the polyadenylation signal can comprise, consist essentially of, or consist of SEQ ID NO: 161. In another specific example, the polyadenylation signal can comprise, consist essentially of, or consist of SEQ ID NO: 162.

[0361] In one example, the polyadenylation signal can comprise a BGH polyadenylation signal. For example, the BGH polyadenylation signal can comprise, consist essentially of, or consist of SEQ ID NO: 797. In another example, the polyadenylation signal can comprise an SV40 polyadenylation signal. For example, the SV40 polyadenylation signal can be a unidirectional SV40 late polyadenylation signal. For example, the transcription terminator sequences that are present in the “early” inverse orientation of SV40 can be mutated (e.g., by mutating the reverse strand AAUAAA sequences to AAUCAA). The SV40 polyA is bidirectional, but the polyadenylation in the “late” orientation is more efficient than the polyadenylation in the “early” orientation. For example, the unidirectional SV40 late polyadenylation signal can comprise, consist essentially of, or consist of SEQ ID NO: 798. In another example, a synthetic polyadenylation signal can be used. For example, the synthetic polyadenylation signal can comprise, consist essentially of, or consist of SEQ ID NO: 799. In another example, two or more polyadenylation signals can be used in combination. For example, the polyadenylation signal can comprise a combination of a BGH polyadenylation signal and an SV40 polyadenylation signal (e.g., an SV40 late polyadenylation signal, such as a unidirectional SV40 late polyadenylation signal). For example, the polyadenylation signal can comprise a combination of a BGH polyadenylation signal and a unidirectional SV40 late polyadenylation signal. For example, the BGH polyadenylation signal can comprise, consist essentially of, or consist of SEQ ID NO: 797, and the unidirectional SV40 late polyadenylation signal can comprise, consist essentially of, or consist of SEQ ID NO: 798. In a specific example, the BGH polyadenylation signal can be upstream (5′) of the SV40 polyadenylation signal (e.g., unidirectional SV40 late polyadenylation signal). For example, the combined polyadenylation signal can comprise the sequence set forth in SEQ ID NO: 800. In another example, the polyadenylation signal can comprise a combination of a BGH polyadenylation signal and a synthetic polyadenylation signal. For example, the BGH polyadenylation signal can comprise, consist essentially of, or consist of SEQ ID NO: 797, and the synthetic polyadenylation signal can comprise, consist essentially of, or consist of SEQ ID NO: 799.

[0362] In some embodiments, a stuffer sequence can be used to increase the time between when RNA polymerase transcribes the polyA to the time when it transcribes the next splice acceptor. For example, the stuffer sequence can be used between two different polyadenylation signals (e.g., between a BGH polyadenylation signal and a synthetic polyadenylation signal. For example, the stuffer sequence can comprise, consist essentially of, or consist of SEQ ID NO: 801.

[0363] In some embodiments, MAZ elements that cause polymerase pausing are used in combination with a polyadenylation signal (e.g., a BGH polyadenylation signal or an SV40 polyadenylation signal). For example, one or more (e.g., at least 1, at least 2, at least 3, at least 4, or about 1 to about 4, about 2 to about 4, about 3 to about 4, or 1, 2, 3, or 4) MAZ elements can be used in combination with a polyadenylation signal. For example, the MAZ element can comprise, consist essentially of, or consist of SEQ ID NO: 802.

[0364] In some embodiments, unidirectional SV40 late polyadenylation signals are used. The SV40 polyA is bidirectional, but the polyadenylation in the “late” orientation is more efficient than the polyadenylation in the “early” orientation. The unidirectional SV40 late polyadenylation signals described herein are positioned in the “late” orientation, with the polyadenylation signals present in the “early” orientation mutated or inactivated. In some embodiments, each instance of the sequence AATAAA in the reverse strand is mutated in the unidirectional SV40 late polyadenylation signal. For example, the two conserved AATAAA poly(A) signals present in the SV40 “early” poly(A) to AATCAA. In some embodiments, the unidirectional SV40 late polyadenylation signal is at least 95%, at least 96%, at least 97%, at least 98%, or at least 99% identical to the sequence set forth in SEQ ID NO: 798. In some embodiments, the unidirectional SV40 late polyadenylation signal comprises, consists essentially of, or consists of the sequence set forth in SEQ ID NO: 798.

[0365] The unidirectional SV40 late polyadenylation signals can be used in combination with (e.g., in tandem with) one or more additional polyadenylation signals. Examples of transcription terminators that can be used include, for example, the human growth hormone (HGH) polyadenylation signal, the simian virus 40 (SV40) late polyadenylation signal, the rabbit beta-globin polyadenylation signal, the bovine growth hormone (BGH) polyadenylation signal, the phosphoglycerate kinase (PGK) polyadenylation signal, an AOX1 transcription termination sequence, a CYC1 transcription termination sequence, or any transcription termination sequence known to be suitable for regulating gene expression in eukaryotic cells. For example, the unidirectional SV40 late polyadenylation signals can be used in combination with (e.g., in tandem with) a bovine growth hormone (BGH) polyadenylation signal, optionally wherein the BGH polyadenylation signal is upstream of (5′ of) the unidirectional SV40 late polyadenylation signal. In some embodiments, the BGH polyadenylation signal is at least 95%, at least 96%, at least 97%, at least 98%, or at least 99% identical to the sequence set forth in SEQ ID NO: 797. In some embodiments, the BGH polyadenylation signal comprises, consists essentially of, or consists of the sequence set forth in SEQ ID NO: 797. In some embodiments, the combination of the BGH polyadenylation signal and the unidirectional SV40 late polyadenylation signal is at least 95%, at least 96%, at least 97%, at least 98%, or at least 99% identical to the sequence set forth in SEQ ID NO: 800. In some embodiments, the combination of the BGH polyadenylation signal and the unidirectional SV40 late polyadenylation signal comprises, consists essentially of, or consists of the sequence set forth in SEQ ID NO: 800.

[0366] In some embodiments, a stuffer sequence can be used to increase the time between when RNA polymerase transcribes the polyA to the time when it transcribes the next splice acceptor. For example, the stuffer sequence can be used between two different polyadenylation signals (e.g., between a BGH polyadenylation signal and a synthetic polyadenylation signal. For example, the stuffer sequence can comprise, consist essentially of, or consist of SEQ ID NO: 801.

[0367] In some embodiments, MAZ elements that cause polymerase pausing are used in combination with a polyadenylation signal (e.g., a BGH polyadenylation signal or an SV40 polyadenylation signal). For example, one or more (e.g., at least 1, at least 2, at least 3, at least 4, or about 1 to about 4, about 2 to about 4, about 3 to about 4, or 1, 2, 3, or 4) MAZ elements can be used in combination with a polyadenylation signal. For example, the MAZ element can comprise, consist essentially of, or consist of SEQ ID NO: 802.

[0368] Methods of designing a suitable polyadenylation tail sequence are known. For example, some unidirectional constructs comprise a polyadenylation tail sequence and/or a polyadenylation signal sequence downstream of an open reading frame (i.e., a polyadenylation tail sequence and/or a polyadenylation signal sequence 3′ of a coding sequence). The polyadenylation tail sequence can be encoded, for example, as a “poly-A” stretch downstream of the coding sequence for the multidomain therapeutic protein (or other protein coding sequence) in the first and/or second segment. A poly-A tail can comprise, for example, at least 20, 30, 40, 50, 60, 70, 80, 90, or 100 adenines, and optionally up to 300 adenines. In a specific example, the poly-A tail comprises 95, 96, 97, 98, 99, or 100 adenine nucleotides. Methods of designing a suitable polyadenylation tail sequence and/or polyadenylation signal sequence are well known. For example, the polyadenylation signal sequence AAUAAA is commonly used in mammalian systems, although variants such as UAUAAA or AU/GUAAA have been identified. See, e.g., Proudfoot (2011) Genes & Dev. 25(17):1770-82, herein incorporated by reference in its entirety for all purposes.

[0369] The unidirectional constructs can, in some cases, comprise one or more splice acceptor sites. Some unidirectional constructs comprise a splice acceptor site located 5′ of the coding sequence for the multidomain therapeutic protein. In a specific example, the splice acceptor is a mouse Alb exon 2 splice acceptor. In a specific example, the splice acceptor can comprise, consist essentially of, or consist of SEQ ID NO: 163.

[0370] The splice acceptor site can, for example, comprise NAG or consist of NAG. In a specific example, the splice acceptor is an ALB splice acceptor (e.g., an ALB splice acceptor used in the splicing together of exons 1 and 2 of ALB (i.e., ALB exon 2 splice acceptor)). For example, such a splice acceptor can be derived from the human ALB gene. In another example, the splice acceptor can be derived from the mouse Alb gene (e.g., an ALB splice acceptor used in the splicing together of exons 1 and 2 of mouse Alb (i.e., mouse Alb exon 2 splice acceptor)). In another example, the splice acceptor is a splice acceptor from the gene encoding the multidomain therapeutic protein. Additional suitable splice acceptor sites useful in eukaryotes, including artificial splice acceptors, are known. See, e.g., Shapiro et al. (1987) Nucleic Acids Res. 15:7155-7174 and Burset et al. (2001) Nucleic Acids Res. 29:255-259, each of which is herein incorporated by reference in its entirety for all purposes.

[0371] The unidirectional constructs can be circular or linear. For example, a unidirectional construct can be linear.

[0372] The unidirectional constructs disclosed herein can be DNA or RNA, single-stranded, double-stranded, or partially single-stranded and partially double-stranded. For example, the constructs can be single- or double-stranded DNA. In some embodiments, the nucleic acid can be modified (e.g., using nucleoside analogs), as described herein. In a specific example, the unidirectional construct is single-stranded (e.g., single-stranded DNA).

[0373] The unidirectional constructs disclosed herein can be modified on either or both ends to include one or more suitable structural features as needed and/or to confer one or more functional benefit. For example, structural modifications can vary depending on the method(s) used to deliver the constructs disclosed herein to a host cell (e.g., use of viral vector delivery or packaging into lipid nanoparticles for delivery). Such modifications include, for example, terminal structures such as inverted terminal repeats (ITR), hairpin, loops, and other structures such as toroids. For example, the constructs disclosed herein can comprise one, two, or three JTRs or can comprise no more than two JTRs. Various methods of structural modifications are known.

[0374] Similarly, one or both ends of the construct can be protected (e.g., from exonucleolytic degradation) by known methods. For example, one or more dideoxynucleotide residues can be added to the 3′ terminus of a linear molecule and/or self-complementary oligonucleotides can be ligated to one or both ends. See, e.g., Chang et al. (1987) Proc. Natl. Acad. Sci. U.S.A. 84:4959-4963 and Nehls et al. (1996) Science 272:886-889, each of which is herein incorporated by reference in its entirety for all purposes. Additional methods for protecting the constructs from degradation include, but are not limited to, addition of terminal amino group(s) and the use of modified internucleotide linkages such as, for example, phosphorothioates, phosphoramidates, and O-methyl ribose or deoxyribose residues.

[0375] As disclosed in more detail herein, the unidirectional constructs disclosed herein can be introduced into a cell as part of a vector having additional sequences such as, for example, replication origins, promoters, and genes encoding antibiotic resistance. The constructs can be introduced as a naked nucleic acid, can be introduced as a nucleic acid complexed with an agent such as a liposome, polymer, or poloxamer, or can be delivered by viral vectors (e.g., adenovirus, AAV, herpesvirus, retrovirus, lentivirus).

[0376] In an exemplary unidirectional construct, the construct comprises a polyadenylation signal sequence located 3′ of the coding sequence for the multidomain therapeutic protein, the construct comprises a splice acceptor site located 5′ of the coding sequence for the multidomain therapeutic protein, and the nucleic acid construct does not comprise a promoter that drives expression of the multidomain therapeutic protein, and optionally the nucleic acid construct does not comprise a homology arm.

### (4) Multidomain Therapeutic Protein Nucleic Acid Constructs

[0377] The multidomain therapeutic protein nucleic acid constructs disclosed herein can be unidirectional constructs or bidirectional constructs. When specific construct sequences are disclosed herein, they are meant to encompass the sequence disclosed or the reverse complement of the sequence. For example, if a construct disclosed herein consists of the hypothetical sequence 5′-CTGGACCGA-3′, it is also meant to encompass the reverse complement of that sequence (5′-TCGGTCCAG-3′). Likewise, when construct elements are disclosed herein in a specific 5′ to 3′ order, they are also meant to encompass the reverse complement of the order of those elements. One reason for this is that, in many embodiments disclosed herein, the constructs are part of a single-stranded recombinant AAV vector. Single-stranded AAV genomes are packaged as either sense (plus-stranded) or anti-sense (minus-stranded genomes), and single-stranded AAV genomes of + and −polarity are packaged with equal frequency into mature rAAV virions. See, e.g., LING et al. (2015) J. Mol. Genet. Med. 9(3):175, Zhou et al. (2008) Mol. Ther. 16(3):494-499, and Samulski et al. (1987) J. Virol. 61:3096-3101, each of which is herein incorporated by reference in its entirety for all purposes.

[0378] In the nucleic acid constructs, the multidomain therapeutic protein coding sequence, the TfR-binding delivery domain coding sequence, and/or the ASM coding sequence can be codon-optimized for expression in a host cell. For example, the multidomain therapeutic protein coding sequence, the TfR-binding delivery domain coding sequence, and/or the ASM coding sequence can be codon optimized or may use one or more alternative codons for one or more amino acids of the protein (i.e., same amino acid sequence). An alternative codon as used herein refers to variations in codon usage for a given amino acid, and may or may not be a preferred or optimized codon (codon optimized) for a given expression system. Preferred codon usage, or codons that are well-tolerated in a given system of expression, are known.

[0379] The nucleic acid constructs disclosed herein can be modified to include any suitable structural feature as needed for any particular use and/or that confers one or more desired functions. For example, the nucleic acid constructs disclosed herein need not comprise a homology arm and/or can be, for example, homology-independent donor constructs.

[0380] In some cases, the nucleic acid construct does not comprise a promoter that drives the expression of the multidomain therapeutic protein. For example, the expression of the multidomain therapeutic protein can be driven by a promoter of the host cell (e.g., the endogenous ALB promoter when the transgene is integrated into a host cell's ALB locus). In other cases, the nucleic acid construct can comprise one or more promoters operably linked to the multidomain therapeutic protein coding sequence. That is, although not required for expression, the constructs disclosed herein may also include transcriptional or translational regulatory sequences such as promoters, enhancers, insulators, internal ribosome entry sites, additional sequences encoding peptides, and/or polyadenylation signals. Some nucleic acid constructs can comprise a promoter that drives expression of the multidomain therapeutic protein. For example, the promoter may be a liver-specific promoter. Examples of liver-specific promoters include TTR promoters, such as human or mouse TTR promoters. In one example, the construct may comprise a TTR promoter, such as a mouse TTR promoter or a human TTR promoter (e.g., the coding sequence for the multidomain therapeutic protein is operably linked to the TTR promoter). In one example, the construct may comprise a SERPINA1 enhancer, such as a mouse SERPINA1 enhancer or a human SERPINA1 enhancer (e.g., the coding sequence for the multidomain therapeutic protein is operably linked to the SERPINA1 enhancer). In one example, the construct may comprise a TTR promoter and a SERPINA1 enhancer, such as a human SERPINA1 enhancer and a mouse TTR promoter (e.g., the coding sequence for the multidomain therapeutic protein is operably linked to the SERPINA1 enhancer and the TTR promoter).

[0381] The nucleic acid constructs can, in some cases, comprise one or more polyadenylation tail sequences or polyadenylation signal sequences. Some nucleic acid constructs can comprise a polyadenylation signal sequence located 3′ of the multidomain therapeutic protein coding sequence. In a specific example, the polyadenylation signal is a simian virus 40 (SV40) late polyadenylation signal (or a variant thereof). In another specific example, the polyadenylation signal is a bovine growth hormone (BGH) polyadenylation signal (or a variant thereof). In another specific example, the polyadenylation signal is a CpG-depleted BGH polyadenylation signal. For example, the polyadenylation signal can be an SV40 polyadenylation signal or a CpG-depleted BGH polyadenylation signal. For example, the polyadenylation signal can comprise, consist essentially of, or consist of SEQ ID NO: 615, 169, or 161. In a specific example, the polyadenylation signal can comprise, consist essentially of, or consist of SEQ ID NO: 615. In a specific example, the polyadenylation signal can comprise, consist essentially of, or consist of SEQ ID NO: 169. In another specific example, the polyadenylation signal can comprise, consist essentially of, or consist of SEQ ID NO: 161. In another specific example, the polyadenylation signal can comprise, consist essentially of, or consist of SEQ ID NO: 162.

[0382] In one example, the polyadenylation signal can comprise a BGH polyadenylation signal. For example, the BGH polyadenylation signal can comprise, consist essentially of, or consist of SEQ ID NO: 797. In another example, the polyadenylation signal can comprise an SV40 polyadenylation signal. For example, the SV40 polyadenylation signal can be a unidirectional SV40 late polyadenylation signal. For example, the transcription terminator sequences that are present in the “early” inverse orientation of SV40 can be mutated (e.g., by mutating the reverse strand AAUAAA sequences to AAUCAA). The SV40 polyA is bidirectional, but the polyadenylation in the “late” orientation is more efficient than the polyadenylation in the “early” orientation. For example, the unidirectional SV40 late polyadenylation signal can comprise, consist essentially of, or consist of SEQ ID NO: 798. In another example, a synthetic polyadenylation signal can be used. For example, the synthetic polyadenylation signal can comprise, consist essentially of, or consist of SEQ ID NO: 799. In another example, two or more polyadenylation signals can be used in combination. For example, the polyadenylation signal can comprise a combination of a BGH polyadenylation signal and an SV40 polyadenylation signal (e.g., an SV40 late polyadenylation signal, such as a unidirectional SV40 late polyadenylation signal). For example, the polyadenylation signal can comprise a combination of a BGH polyadenylation signal and a unidirectional SV40 late polyadenylation signal. For example, the BGH polyadenylation signal can comprise, consist essentially of, or consist of SEQ ID NO: 797, and the unidirectional SV40 late polyadenylation signal can comprise, consist essentially of, or consist of SEQ ID NO: 798. In a specific example, the BGH polyadenylation signal can be upstream (5′) of the SV40 polyadenylation signal (e.g., unidirectional SV40 late polyadenylation signal). For example, the combined polyadenylation signal can comprise the sequence set forth in SEQ ID NO: 800. In another example, the polyadenylation signal can comprise a combination of a BGH polyadenylation signal and a synthetic polyadenylation signal. For example, the BGH polyadenylation signal can comprise, consist essentially of, or consist of SEQ ID NO: 797, and the synthetic polyadenylation signal can comprise, consist essentially of, or consist of SEQ ID NO: 799. In some embodiments, the nucleic acid construct is a unidirectional construct.

[0383] In some embodiments, a stuffer sequence can be used to increase the time between when RNA polymerase transcribes the polyA to the time when it transcribes the next splice acceptor. For example, the stuffer sequence can be used between two different polyadenylation signals (e.g., between a BGH polyadenylation signal and a synthetic polyadenylation signal. For example, the stuffer sequence can comprise, consist essentially of, or consist of SEQ ID NO: 801.

[0384] In some embodiments, MAZ elements that cause polymerase pausing are used in combination with a polyadenylation signal (e.g., a BGH polyadenylation signal or an SV40 polyadenylation signal). For example, one or more (e.g., at least 1, at least 2, at least 3, at least 4, or about 1 to about 4, about 2 to about 4, about 3 to about 4, or 1, 2, 3, or 4) MAZ elements can be used in combination with a polyadenylation signal. For example, the MAZ element can comprise, consist essentially of, or consist of SEQ ID NO: 802.

[0385] In some embodiments, unidirectional SV40 late polyadenylation signals are used. The SV40 polyA is bidirectional, but the polyadenylation in the “late” orientation is more efficient than the polyadenylation in the “early” orientation. The unidirectional SV40 late polyadenylation signals described herein are positioned in the “late” orientation, with the polyadenylation signals present in the “early” orientation mutated or inactivated. In some embodiments, each instance of the sequence AATAAA in the reverse strand is mutated in the unidirectional SV40 late polyadenylation signal. For example, the two conserved AATAAA poly(A) signals present in the SV40 “early” poly(A) to AATCAA. In some embodiments, the unidirectional SV40 late polyadenylation signal is at least 95%, at least 96%, at least 97%, at least 98%, or at least 99% identical to the sequence set forth in SEQ ID NO: 798. In some embodiments, the unidirectional SV40 late polyadenylation signal comprises, consists essentially of, or consists of the sequence set forth in SEQ ID NO: 798.

[0386] The unidirectional SV40 late polyadenylation signals can be used in combination with (e.g., in tandem with) one or more additional polyadenylation signals. Examples of transcription terminators that can be used include, for example, the human growth hormone (HGH) polyadenylation signal, the simian virus 40 (SV40) late polyadenylation signal, the rabbit beta-globin polyadenylation signal, the bovine growth hormone (BGH) polyadenylation signal, the phosphoglycerate kinase (PGK) polyadenylation signal, an AOX1 transcription termination sequence, a CYC1 transcription termination sequence, or any transcription termination sequence known to be suitable for regulating gene expression in eukaryotic cells. For example, the unidirectional SV40 late polyadenylation signals can be used in combination with (e.g., in tandem with) a bovine growth hormone (BGH) polyadenylation signal, optionally wherein the BGH polyadenylation signal is upstream of (5′ of) the unidirectional SV40 late polyadenylation signal. In some embodiments, the BGH polyadenylation signal is at least 95%, at least 96%, at least 97%, at least 98%, or at least 99% identical to the sequence set forth in SEQ ID NO: 797. In some embodiments, the BGH polyadenylation signal comprises, consists essentially of, or consists of the sequence set forth in SEQ ID NO: 797. In some embodiments, the combination of the BGH polyadenylation signal and the unidirectional SV40 late polyadenylation signal is at least 95%, at least 96%, at least 97%, at least 98%, or at least 99% identical to the sequence set forth in SEQ ID NO: 800. In some embodiments, the combination of the BGH polyadenylation signal and the unidirectional SV40 late polyadenylation signal comprises, consists essentially of, or consists of the sequence set forth in SEQ ID NO: 800.

[0387] In some embodiments, a stuffer sequence can be used to increase the time between when RNA polymerase transcribes the polyA to the time when it transcribes the next splice acceptor. For example, the stuffer sequence can be used between two different polyadenylation signals (e.g., between a BGH polyadenylation signal and a synthetic polyadenylation signal. For example, the stuffer sequence can comprise, consist essentially of, or consist of SEQ ID NO: 801.

[0388] In some embodiments, MAZ elements that cause polymerase pausing are used in combination with a polyadenylation signal (e.g., a BGH polyadenylation signal or an SV40 polyadenylation signal). For example, one or more (e.g., at least 1, at least 2, at least 3, at least 4, or about 1 to about 4, about 2 to about 4, about 3 to about 4, or 1, 2, 3, or 4) MAZ elements can be used in combination with a polyadenylation signal. For example, the MAZ element can comprise, consist essentially of, or consist of SEQ ID NO: 802.

[0389] Methods of designing a suitable polyadenylation tail sequence are known. For example, some nucleic acid constructs comprise a polyadenylation tail sequence and/or a polyadenylation signal sequence downstream of an open reading frame (i.e., a polyadenylation tail sequence and/or a polyadenylation signal sequence 3′ of a coding sequence). The polyadenylation tail sequence can be encoded, for example, as a “poly-A” stretch downstream of the multidomain therapeutic protein coding sequence (or other protein coding sequence) in the first and/or second segment. A poly-A tail can comprise, for example, at least 20, 30, 40, 50, 60, 70, 80, 90, or 100 adenines, and optionally up to 300 adenines. In a specific example, the poly-A tail comprises 95, 96, 97, 98, 99, or 100 adenine nucleotides. Methods of designing a suitable polyadenylation tail sequence and/or polyadenylation signal sequence are well known. For example, the polyadenylation signal sequence AAUAAA is commonly used in mammalian systems, although variants such as UAUAAA or AU/GUAAA have been identified. See, e.g., Proudfoot (2011) Genes & Dev. 25(17):1770-82, herein incorporated by reference in its entirety for all purposes.

[0390] The nucleic acid constructs can, in some cases, comprise one or more splice acceptor sites. Some nucleic acid constructs comprise a splice acceptor site located 5′ of the multidomain therapeutic protein coding sequence. In a specific example, the splice acceptor is a mouse Alb exon 2 splice acceptor. In a specific example, the splice acceptor can comprise, consist essentially of, or consist of SEQ ID NO: 163.

[0391] The splice acceptor site can, for example, comprise NAG or consist of NAG. In a specific example, the splice acceptor is an ALB splice acceptor (e.g., an ALB splice acceptor used in the splicing together of exons 1 and 2 of ALB (i.e., ALB exon 2 splice acceptor)). For example, such a splice acceptor can be derived from the human ALB gene. In another example, the splice acceptor can be derived from the mouse Alb gene (e.g., an ALB splice acceptor used in the splicing together of exons 1 and 2 of mouse Alb (i.e., mouse Alb exon 2 splice acceptor)). In another example, the splice acceptor is a SMPD1 splice acceptor. For example, such a splice acceptor can be derived from the human SMPD1 gene. Alternatively, such a splice acceptor can be derived from the mouse SMPD1 gene. Additional suitable splice acceptor sites useful in eukaryotes, including artificial splice acceptors, are known. See, e.g., Shapiro et al. (1987) Nucleic Acids Res. 15:7155-7174 and Burset et al. (2001) Nucleic Acids Res. 29:255-259, each of which is herein incorporated by reference in its entirety for all purposes.

[0392] The nucleic acid constructs can be circular or linear. For example, a nucleic acid construct can be linear. The nucleic acid constructs disclosed herein can be DNA or RNA, single-stranded, double-stranded, or partially single-stranded and partially double-stranded. For example, the constructs can be single- or double-stranded DNA. In some embodiments, the nucleic acid can be modified (e.g., using nucleoside analogs), as described herein. In a specific example, the nucleic acid construct is single-stranded (e.g., single-stranded DNA).

[0393] The nucleic acid constructs disclosed herein can be modified on either or both ends to include one or more suitable structural features as needed and/or to confer one or more functional benefit. For example, structural modifications can vary depending on the method(s) used to deliver the constructs disclosed herein to a host cell (e.g., use of viral vector delivery or packaging into lipid nanoparticles for delivery). Such modifications include, for example, terminal structures such as inverted terminal repeats (ITR), hairpin, loops, and other structures such as toroids. For example, the nucleic acid constructs disclosed herein can comprise one, two, or three ITRs or can comprise no more than two ITRs. Various methods of structural modifications are known.

[0394] Similarly, one or both ends of the nucleic acid construct can be protected (e.g., from exonucleolytic degradation) by known methods. For example, one or more dideoxynucleotide residues can be added to the 3′ terminus of a linear molecule and/or self-complementary oligonucleotides can be ligated to one or both ends. See, e.g., Chang et al. (1987) Proc. Natl. Acad. Sci. U.S.A. 84:4959-4963 and Nehls et al. (1996) Science 272:886-889, each of which is herein incorporated by reference in its entirety for all purposes. Additional methods for protecting the constructs from degradation include, but are not limited to, addition of terminal amino group(s) and the use of modified internucleotide linkages such as, for example, phosphorothioates, phosphoramidates, and O-methyl ribose or deoxyribose residues.

[0395] As disclosed in more detail herein, the nucleic acid constructs disclosed herein can be introduced into a cell as part of a vector having additional sequences such as, for example, replication origins, promoters, and genes encoding antibiotic resistance. The nucleic acid constructs can be introduced as a naked nucleic acid, can be introduced as a nucleic acid complexed with an agent such as a liposome, polymer, or poloxamer, or can be delivered by viral vectors (e.g., adenovirus, AAV, herpesvirus, retrovirus, lentivirus).

[0396] The multidomain therapeutic protein coding sequence, the TfR-binding delivery domain coding sequence, and/or the ASM coding sequence in the nucleic acid constructs disclosed herein may include one or more modifications such as codon optimization (e.g., to human codons), depletion of CpG dinucleotides, mutation of cryptic splice sites, addition of one or more glycosylation sites, or any combination thereof. CpG dinucleotides in a construct can limit the therapeutic utility of the construct. First, unmethylated CpG dinucleotides can interact with host toll-like receptor-9 (TLR-9) to stimulate innate, proinflammatory immune responses. Second, once the CpG dinucleotides become methylated, they can result in the suppression of transgene expression coordinated by methyl-CpG binding proteins. Cryptic splice sites are sequences in a pre-messenger RNA that are not normally used as splice sites, but that can be activated, for example, by mutations that either inactivate canonical splice sites or create splice sites where one did not exist before. Accurate splice site selection is critical for successful gene expression, and removal of cryptic splice sites can favor use of the normal or intended splice site.

[0397] In one example, a multidomain therapeutic protein coding sequence, a TfR-binding delivery domain coding sequence, and/or an ASM coding sequence in a nucleic acid construct disclosed herein has one or more cryptic splice sites mutated or removed. In another example, a multidomain therapeutic protein coding sequence, a TfR-binding delivery domain coding sequence, and/or an ASM coding sequence in a nucleic acid construct disclosed herein has all identified cryptic splice sites mutated or removed. In another example, a multidomain therapeutic protein coding sequence, a TfR-binding delivery domain coding sequence, and/or an ASM coding sequence in a nucleic acid construct disclosed herein has one or more CpG dinucleotides removed (i.e., is CpG depleted). In another example, a multidomain therapeutic protein coding sequence, a TfR-binding delivery domain coding sequence, and/or an ASM coding sequence in a nucleic acid construct disclosed herein has all CpG dinucleotides removed. In another example, a multidomain therapeutic protein coding sequence, a TfR-binding delivery domain coding sequence, and/or an ASM coding sequence in a nucleic acid construct disclosed herein is codon optimized (e.g., codon optimized for expression in a human or mammal). In a specific example, a multidomain therapeutic protein coding sequence, a TfR-binding delivery domain coding sequence, and/or an ASM coding sequence in a nucleic acid construct disclosed herein has one or more CpG dinucleotides removed (i.e., is CpG depleted) and has one or more cryptic splice sites mutated or removed. In another specific example, a multidomain therapeutic protein coding sequence, a TfR-binding delivery domain coding sequence, and/or an ASM coding sequence in a nucleic acid construct disclosed herein has all CpG dinucleotides removed and has one or more or all identified cryptic splice sites mutated or removed. In another specific example, a multidomain therapeutic protein coding sequence, a TfR-binding delivery domain coding sequence, and/or an ASM coding sequence in a nucleic acid construct disclosed herein has one or more CpG dinucleotides removed (i.e., is CpG depleted) and is codon optimized (e.g., codon optimized for expression in a human or mammal). In another specific example, a multidomain therapeutic protein coding sequence, a TfR-binding delivery domain coding sequence, and/or an ASM coding sequence in a nucleic acid construct disclosed herein has all CpG dinucleotides removed (i.e., is fully CpG depleted) and is codon optimized (e.g., codon optimized for expression in a human or mammal).

[0398] In an exemplary nucleic acid construct, the construct comprises a polyadenylation signal sequence located 3′ of the multidomain therapeutic protein coding sequence, the construct comprises a splice acceptor site located 5′ of the multidomain therapeutic protein coding sequence, and the nucleic acid construct comprises a promoter that drives expression of the multidomain therapeutic protein.

[0399] In an exemplary nucleic acid construct, the construct comprises a polyadenylation signal sequence located 3′ of the multidomain therapeutic protein coding sequence, and the nucleic acid construct comprises a promoter that drives expression of the multidomain therapeutic protein (e.g., for episomal gene expression).

[0400] In an exemplary nucleic acid construct, the construct comprises a polyadenylation signal sequence located 3′ of the multidomain therapeutic protein coding sequence, the construct comprises a splice acceptor site located 5′ of the multidomain therapeutic protein coding sequence, and the nucleic acid construct does not comprise a promoter that drives expression of the multidomain therapeutic protein, and optionally the nucleic acid construct does not comprise a homology arm.

[0401] In a specific example of a multidomain therapeutic protein nucleic acid construct, the encoded multidomain therapeutic protein can comprise SEQ ID NO: 737 or can be at least 90%, at least 91%, at least 92%, at least 93%, at least 94%, at least 95%, at least 96%, at least 97%, at least 98%, at least 99%, or at least 99.5% identical to SEQ ID NO: 737. In another specific example, the multidomain therapeutic protein can consist essentially of SEQ ID NO: 737. In another specific example, the multidomain therapeutic protein can consist of SEQ ID NO: 737.

[0402] Various multidomain therapeutic protein coding sequences are provided. In one example, the multidomain therapeutic protein coding sequence is (or comprises a sequence) at least 90%, at least 91%, at least 92%, at least 93%, at least 94%, at least 95%, at least 96%, at least 97%, at least 98%, at least 99%, at least 99.5%, or 100% identical to SEQ ID NO: 736. In another example, the multidomain therapeutic protein coding sequence is (or comprises a sequence) at least 95%, at least 96%, at least 97%, at least 98%, at least 99%, at least 99.5%, or 100% identical to SEQ ID NO: 736. In another example, the multidomain therapeutic protein coding sequence is (or comprises a sequence) at least 99%, at least 99.5%, or 100% identical to SEQ ID NO: 736. In another example, the multidomain therapeutic protein coding sequence comprises the sequence set forth in SEQ ID NO: 736. In another example, the multidomain therapeutic protein coding sequence consists essentially of the sequence set forth in SEQ ID NO: 736. In another example, the multidomain therapeutic protein coding sequence consists of the sequence set forth in SEQ ID NO: 736. Optionally, the multidomain therapeutic protein coding sequence encodes a multidomain therapeutic protein (or a multidomain therapeutic protein comprising a sequence) at least 90%, at least 91%, at least 92%, at least 93%, at least 94%, at least 95%, at least 96%, at least 97%, at least 98%, at least 99%, at least 99.5%, or 100% identical to SEQ ID NO: 737 (and, e.g., retaining the activity of native ASM). Optionally, the multidomain therapeutic protein coding sequence encodes a multidomain therapeutic protein (or a multidomain therapeutic protein comprising a sequence) at least 95%, at least 96%, at least 97%, at least 98%, at least 99%, at least 99.5%, or 100% identical to SEQ ID NO: 737 (and, e.g., retaining the activity of native ASM). Optionally, the multidomain therapeutic protein coding sequence in the above examples encodes a multidomain therapeutic protein (or a multidomain therapeutic protein comprising a sequence) at least 99%, at least 99.5%, or 100% identical to SEQ ID NO: 737 (and, e.g., retaining the activity of native ASM). Optionally, the multidomain therapeutic protein coding sequence in the above examples encodes a multidomain therapeutic protein comprising the sequence set forth in SEQ ID NO: 737. Optionally, the multidomain therapeutic protein coding sequence in the above examples encodes a multidomain therapeutic protein consisting essentially of the sequence set forth in SEQ ID NO: 737. Optionally, the multidomain therapeutic protein coding sequence in the above examples encodes a multidomain therapeutic protein consisting of the sequence set forth in SEQ ID NO: 737.

[0403] In a specific example of a multidomain therapeutic protein nucleic acid construct, the encoded multidomain therapeutic protein can comprise SEQ ID NO: 739 or can be at least 90%, at least 91%, at least 92%, at least 93%, at least 94%, at least 95%, at least 96%, at least 97%, at least 98%, at least 99%, or at least 99.5% identical to SEQ ID NO: 739. In another specific example, the multidomain therapeutic protein can consist essentially of SEQ ID NO: 739. In another specific example, the multidomain therapeutic protein can consist of SEQ ID NO: 739.

[0404] Various multidomain therapeutic protein coding sequences are provided. In one example, the multidomain therapeutic protein coding sequence is (or comprises a sequence) at least 90%, at least 91%, at least 92%, at least 93%, at least 94%, at least 95%, at least 96%, at least 97%, at least 98%, at least 99%, at least 99.5%, or 100% identical to SEQ ID NO: 738. In another example, the multidomain therapeutic protein coding sequence is (or comprises a sequence) at least 95%, at least 96%, at least 97%, at least 98%, at least 99%, at least 99.5%, or 100% identical to SEQ ID NO: 738. In another example, the multidomain therapeutic protein coding sequence is (or comprises a sequence) at least 99%, at least 99.5%, or 100% identical to SEQ ID NO: 738. In another example, the multidomain therapeutic protein coding sequence comprises the sequence set forth in SEQ ID NO: 738. In another example, the multidomain therapeutic protein coding sequence consists essentially of the sequence set forth in SEQ ID NO: 738. In another example, the multidomain therapeutic protein coding sequence consists of the sequence set forth in SEQ ID NO: 738. Optionally, the multidomain therapeutic protein coding sequence encodes a multidomain therapeutic protein (or a multidomain therapeutic protein comprising a sequence) at least 90%, at least 91%, at least 92%, at least 93%, at least 94%, at least 95%, at least 96%, at least 97%, at least 98%, at least 99%, at least 99.5%, or 100% identical to SEQ ID NO: 739 (and, e.g., retaining the activity of native ASM). Optionally, the multidomain therapeutic protein coding sequence encodes a multidomain therapeutic protein (or a multidomain therapeutic protein comprising a sequence) at least 95%, at least 96%, at least 97%, at least 98%, at least 99%, at least 99.5%, or 100% identical to SEQ ID NO: 739 (and, e.g., retaining the activity of native ASM). Optionally, the multidomain therapeutic protein coding sequence in the above examples encodes a multidomain therapeutic protein (or a multidomain therapeutic protein comprising a sequence) at least 99%, at least 99.5%, or 100% identical to SEQ ID NO: 739 (and, e.g., retaining the activity of native ASM). Optionally, the multidomain therapeutic protein coding sequence in the above examples encodes a multidomain therapeutic protein comprising the sequence set forth in SEQ ID NO: 739. Optionally, the multidomain therapeutic protein coding sequence in the above examples encodes a multidomain therapeutic protein consisting essentially of the sequence set forth in SEQ ID NO: 739. Optionally, the multidomain therapeutic protein coding sequence in the above examples encodes a multidomain therapeutic protein consisting of the sequence set forth in SEQ ID NO: 739.

[0405] The nucleic acid construct can comprise, for example, (1) a 5′ ITR (e.g., such as the one set forth in SEQ ID NO: 160), (2) a splice acceptor site (e.g., a mouse Alb exon 2 splice acceptor, such as the one set forth in SEQ ID NO: 163), (3) the multidomain therapeutic protein coding sequence, (4) a polyadenylation signal (e.g., an SV40 polyadenylation signal, such as the one set forth in SEQ ID NO: 615), and (5) a 3′ ITR (e.g., such as the one set forth in SEQ ID NO: 160 or the reverse complement thereof).

[0406] In some cases, the multidomain therapeutic proteins are anti-hTfR:ASM scFv fusion proteins in the format V_{L}-(Gly₄Ser)₃(SEQ ID NO: 616)-V_{H}:ASM (Gly₄Ser=SEQ ID NO: 537). In a specific example of a multidomain therapeutic protein nucleic acid construct, the encoded multidomain therapeutic protein can comprise SEQ ID NO: 737 or 739 or can be at least 90%, at least 91%, at least 92%, at least 93%, at least 94%, at least 95%, at least 96%, at least 97%, at least 98%, at least 99%, or at least 99.5% identical to SEQ ID NO: 737 or 739. In another specific example, the multidomain therapeutic protein can consist essentially of SEQ ID NO: 737 or 739. In another specific example, the multidomain therapeutic protein can consist of SEQ ID NO: 737 or 739.

[0407] In some cases, the multidomain therapeutic proteins are anti-hTfR:ASM Fab fusion proteins (e.g., in the format HC-linker-LC-linker-ASM). In a specific example of a multidomain therapeutic protein nucleic acid construct, the encoded multidomain therapeutic protein can comprise SEQ ID NO: 833 or can be at least 90%, at least 91%, at least 92%, at least 93%, at least 94%, at least 95%, at least 96%, at least 97%, at least 98%, at least 99%, or at least 99.5% identical to SEQ ID NO: 833. In another specific example, the multidomain therapeutic protein can consist essentially of SEQ ID NO: 833. In another specific example, the multidomain therapeutic protein can consist of SEQ ID NO: 833.

[0408] Various multidomain therapeutic protein coding sequences are provided. In one example, the multidomain therapeutic protein coding sequence is (or comprises a sequence) at least 90%, at least 91%, at least 92%, at least 93%, at least 94%, at least 95%, at least 96%, at least 97%, at least 98%, at least 99%, at least 99.5%, or 100% identical to SEQ ID NO: 832. In another example, the multidomain therapeutic protein coding sequence is (or comprises a sequence) at least 95%, at least 96%, at least 97%, at least 98%, at least 99%, at least 99.5%, or 100% identical to SEQ ID NO: 832. In another example, the multidomain therapeutic protein coding sequence is (or comprises a sequence) at least 99%, at least 99.5%, or 100% identical to SEQ ID NO: 832. In another example, the multidomain therapeutic protein coding sequence comprises the sequence set forth in SEQ ID NO: 832. In another example, the multidomain therapeutic protein coding sequence consists essentially of the sequence set forth in SEQ ID NO: 832. In another example, the multidomain therapeutic protein coding sequence consists of the sequence set forth in SEQ ID NO: 832. Optionally, the multidomain therapeutic protein coding sequence encodes a multidomain therapeutic protein (or a multidomain therapeutic protein comprising a sequence) at least 90%, at least 91%, at least 92%, at least 93%, at least 94%, at least 95%, at least 96%, at least 97%, at least 98%, at least 99%, at least 99.5%, or 100% identical to SEQ ID NO: 833 (and, e.g., retaining the activity of native ASM). Optionally, the multidomain therapeutic protein coding sequence encodes a multidomain therapeutic protein (or a multidomain therapeutic protein comprising a sequence) at least 95%, at least 96%, at least 97%, at least 98%, at least 99%, at least 99.5%, or 100% identical to SEQ ID NO: 833 (and, e.g., retaining the activity of native ASM). Optionally, the multidomain therapeutic protein coding sequence in the above examples encodes a multidomain therapeutic protein (or a multidomain therapeutic protein comprising a sequence) at least 99%, at least 99.5%, or 100% identical to SEQ ID NO: 833 (and, e.g., retaining the activity of native ASM). Optionally, the multidomain therapeutic protein coding sequence in the above examples encodes a multidomain therapeutic protein comprising the sequence set forth in SEQ ID NO: 833. Optionally, the multidomain therapeutic protein coding sequence in the above examples encodes a multidomain therapeutic protein consisting essentially of the sequence set forth in SEQ ID NO: 833. Optionally, the multidomain therapeutic protein coding sequence in the above examples encodes a multidomain therapeutic protein consisting of the sequence set forth in SEQ ID NO: 833.

[0409] In some cases, the multidomain therapeutic proteins are anti-hTfR:ASM Fab fusion proteins (e.g., in the format LC-linker-HC-linker-ASM). In a specific example of a multidomain therapeutic protein nucleic acid construct, the encoded multidomain therapeutic protein can comprise SEQ ID NO: 835 or can be at least 90%, at least 91%, at least 92%, at least 93%, at least 94%, at least 95%, at least 96%, at least 97%, at least 98%, at least 99%, or at least 99.5% identical to SEQ ID NO: 835. In another specific example, the multidomain therapeutic protein can consist essentially of SEQ ID NO: 835. In another specific example, the multidomain therapeutic protein can consist of SEQ ID NO: 835.

[0410] Various multidomain therapeutic protein coding sequences are provided. In one example, the multidomain therapeutic protein coding sequence is (or comprises a sequence) at least 90%, at least 91%, at least 92%, at least 93%, at least 94%, at least 95%, at least 96%, at least 97%, at least 98%, at least 99%, at least 99.5%, or 100% identical to SEQ ID NO: 834. In another example, the multidomain therapeutic protein coding sequence is (or comprises a sequence) at least 95%, at least 96%, at least 97%, at least 98%, at least 99%, at least 99.5%, or 100% identical to SEQ ID NO: 834. In another example, the multidomain therapeutic protein coding sequence is (or comprises a sequence) at least 99%, at least 99.5%, or 100% identical to SEQ ID NO: 834. In another example, the multidomain therapeutic protein coding sequence comprises the sequence set forth in SEQ ID NO: 834. In another example, the multidomain therapeutic protein coding sequence consists essentially of the sequence set forth in SEQ ID NO: 834. In another example, the multidomain therapeutic protein coding sequence consists of the sequence set forth in SEQ ID NO: 834. Optionally, the multidomain therapeutic protein coding sequence encodes a multidomain therapeutic protein (or a multidomain therapeutic protein comprising a sequence) at least 90%, at least 91%, at least 92%, at least 93%, at least 94%, at least 95%, at least 96%, at least 97%, at least 98%, at least 99%, at least 99.5%, or 100% identical to SEQ ID NO: 835 (and, e.g., retaining the activity of native ASM). Optionally, the multidomain therapeutic protein coding sequence encodes a multidomain therapeutic protein (or a multidomain therapeutic protein comprising a sequence) at least 95%, at least 96%, at least 97%, at least 98%, at least 99%, at least 99.5%, or 100% identical to SEQ ID NO: 835 (and, e.g., retaining the activity of native ASM). Optionally, the multidomain therapeutic protein coding sequence in the above examples encodes a multidomain therapeutic protein (or a multidomain therapeutic protein comprising a sequence) at least 99%, at least 99.5%, or 100% identical to SEQ ID NO: 835 (and, e.g., retaining the activity of native ASM). Optionally, the multidomain therapeutic protein coding sequence in the above examples encodes a multidomain therapeutic protein comprising the sequence set forth in SEQ ID NO: 835. Optionally, the multidomain therapeutic protein coding sequence in the above examples encodes a multidomain therapeutic protein consisting essentially of the sequence set forth in SEQ ID NO: 835. Optionally, the multidomain therapeutic protein coding sequence in the above examples encodes a multidomain therapeutic protein consisting of the sequence set forth in SEQ ID NO: 835.

[0411] In some cases, the multidomain therapeutic proteins are anti-hTfR:ASM scFv fusion proteins (e.g., in the format V_{L}-linker-V_{H}-(Gly₄Ser)₂(SEQ ID NO: 617)-ASM). In a specific example of a multidomain therapeutic protein nucleic acid construct, the encoded multidomain therapeutic protein can comprise SEQ ID NO: 837 or can be at least 90%, at least 91%, at least 92%, at least 93%, at least 94%, at least 95%, at least 96%, at least 97%, at least 98%, at least 99%, or at least 99.5% identical to SEQ ID NO: 837. In another specific example, the multidomain therapeutic protein can consist essentially of SEQ ID NO: 837. In another specific example, the multidomain therapeutic protein can consist of SEQ ID NO: 837.

[0412] Various multidomain therapeutic protein coding sequences are provided. In one example, the multidomain therapeutic protein coding sequence is (or comprises a sequence) at least 90%, at least 91%, at least 92%, at least 93%, at least 94%, at least 95%, at least 96%, at least 97%, at least 98%, at least 99%, at least 99.5%, or 100% identical to SEQ ID NO: 836. In another example, the multidomain therapeutic protein coding sequence is (or comprises a sequence) at least 95%, at least 96%, at least 97%, at least 98%, at least 99%, at least 99.5%, or 100% identical to SEQ ID NO: 836. In another example, the multidomain therapeutic protein coding sequence is (or comprises a sequence) at least 99%, at least 99.5%, or 100% identical to SEQ ID NO: 836. In another example, the multidomain therapeutic protein coding sequence comprises the sequence set forth in SEQ ID NO: 836. In another example, the multidomain therapeutic protein coding sequence consists essentially of the sequence set forth in SEQ ID NO: 836. In another example, the multidomain therapeutic protein coding sequence consists of the sequence set forth in SEQ ID NO: 836. Optionally, the multidomain therapeutic protein coding sequence encodes a multidomain therapeutic protein (or a multidomain therapeutic protein comprising a sequence) at least 90%, at least 91%, at least 92%, at least 93%, at least 94%, at least 95%, at least 96%, at least 97%, at least 98%, at least 99%, at least 99.5%, or 100% identical to SEQ ID NO: 837 (and, e.g., retaining the activity of native ASM). Optionally, the multidomain therapeutic protein coding sequence encodes a multidomain therapeutic protein (or a multidomain therapeutic protein comprising a sequence) at least 95%, at least 96%, at least 97%, at least 98%, at least 99%, at least 99.5%, or 100% identical to SEQ ID NO: 837 (and, e.g., retaining the activity of native ASM). Optionally, the multidomain therapeutic protein coding sequence in the above examples encodes a multidomain therapeutic protein (or a multidomain therapeutic protein comprising a sequence) at least 99%, at least 99.5%, or 100% identical to SEQ ID NO: 837 (and, e.g., retaining the activity of native ASM). Optionally, the multidomain therapeutic protein coding sequence in the above examples encodes a multidomain therapeutic protein comprising the sequence set forth in SEQ ID NO: 837. Optionally, the multidomain therapeutic protein coding sequence in the above examples encodes a multidomain therapeutic protein consisting essentially of the sequence set forth in SEQ ID NO: 837. Optionally, the multidomain therapeutic protein coding sequence in the above examples encodes a multidomain therapeutic protein consisting of the sequence set forth in SEQ ID NO: 837.

[0413] In some cases, the multidomain therapeutic proteins are anti-hTfR:ASM scFv fusion proteins (e.g., in the format V_{L}-linker-V_{H}-(2XH4 linker)-ASM). In a specific example of a multidomain therapeutic protein nucleic acid construct, the encoded multidomain therapeutic protein can comprise SEQ ID NO: 839 or can be at least 90%, at least 91%, at least 92%, at least 93%, at least 94%, at least 95%, at least 96%, at least 97%, at least 98%, at least 99%, or at least 99.5% identical to SEQ ID NO: 839. In another specific example, the multidomain therapeutic protein can consist essentially of SEQ ID NO: 839. In another specific example, the multidomain therapeutic protein can consist of SEQ ID NO: 839.

[0414] Various multidomain therapeutic protein coding sequences are provided. In one example, the multidomain therapeutic protein coding sequence is (or comprises a sequence) at least 90%, at least 91%, at least 92%, at least 93%, at least 94%, at least 95%, at least 96%, at least 97%, at least 98%, at least 99%, at least 99.5%, or 100% identical to SEQ ID NO: 838. In another example, the multidomain therapeutic protein coding sequence is (or comprises a sequence) at least 95%, at least 96%, at least 97%, at least 98%, at least 99%, at least 99.5%, or 100% identical to SEQ ID NO: 838. In another example, the multidomain therapeutic protein coding sequence is (or comprises a sequence) at least 99%, at least 99.5%, or 100% identical to SEQ ID NO: 838. In another example, the multidomain therapeutic protein coding sequence comprises the sequence set forth in SEQ ID NO: 838. In another example, the multidomain therapeutic protein coding sequence consists essentially of the sequence set forth in SEQ ID NO: 838. In another example, the multidomain therapeutic protein coding sequence consists of the sequence set forth in SEQ ID NO: 838. Optionally, the multidomain therapeutic protein coding sequence encodes a multidomain therapeutic protein (or a multidomain therapeutic protein comprising a sequence) at least 90%, at least 91%, at least 92%, at least 93%, at least 94%, at least 95%, at least 96%, at least 97%, at least 98%, at least 99%, at least 99.5%, or 100% identical to SEQ ID NO: 839 (and, e.g., retaining the activity of native ASM). Optionally, the multidomain therapeutic protein coding sequence encodes a multidomain therapeutic protein (or a multidomain therapeutic protein comprising a sequence) at least 95%, at least 96%, at least 97%, at least 98%, at least 99%, at least 99.5%, or 100% identical to SEQ ID NO: 839 (and, e.g., retaining the activity of native ASM). Optionally, the multidomain therapeutic protein coding sequence in the above examples encodes a multidomain therapeutic protein (or a multidomain therapeutic protein comprising a sequence) at least 99%, at least 99.5%, or 100% identical to SEQ ID NO: 839 (and, e.g., retaining the activity of native ASM). Optionally, the multidomain therapeutic protein coding sequence in the above examples encodes a multidomain therapeutic protein comprising the sequence set forth in SEQ ID NO: 839. Optionally, the multidomain therapeutic protein coding sequence in the above examples encodes a multidomain therapeutic protein consisting essentially of the sequence set forth in SEQ ID NO: 839. Optionally, the multidomain therapeutic protein coding sequence in the above examples encodes a multidomain therapeutic protein consisting of the sequence set forth in SEQ ID NO: 839.

[0415] In some cases, the multidomain therapeutic proteins are anti-hTfR:ASM scFv fusion proteins (e.g., in the format V_{L}-linker-V_{H}-(Gly₄Ser)₃(SEQ ID NO: 616)-ASM). In a specific example of a multidomain therapeutic protein nucleic acid construct, the encoded multidomain therapeutic protein can comprise SEQ ID NO: 841 or can be at least 90%, at least 91%, at least 92%, at least 93%, at least 94%, at least 95%, at least 96%, at least 97%, at least 98%, at least 99%, or at least 99.5% identical to SEQ ID NO: 841. In another specific example, the multidomain therapeutic protein can consist essentially of SEQ ID NO: 841. In another specific example, the multidomain therapeutic protein can consist of SEQ ID NO: 841.

[0416] Various multidomain therapeutic protein coding sequences are provided. In one example, the multidomain therapeutic protein coding sequence is (or comprises a sequence) at least 90%, at least 91%, at least 92%, at least 93%, at least 94%, at least 95%, at least 96%, at least 97%, at least 98%, at least 99%, at least 99.5%, or 100% identical to SEQ ID NO: 840. In another example, the multidomain therapeutic protein coding sequence is (or comprises a sequence) at least 95%, at least 96%, at least 97%, at least 98%, at least 99%, at least 99.5%, or 100% identical to SEQ ID NO: 840. In another example, the multidomain therapeutic protein coding sequence is (or comprises a sequence) at least 99%, at least 99.5%, or 100% identical to SEQ ID NO: 840. In another example, the multidomain therapeutic protein coding sequence comprises the sequence set forth in SEQ ID NO: 840. In another example, the multidomain therapeutic protein coding sequence consists essentially of the sequence set forth in SEQ ID NO: 840. In another example, the multidomain therapeutic protein coding sequence consists of the sequence set forth in SEQ ID NO: 840. Optionally, the multidomain therapeutic protein coding sequence encodes a multidomain therapeutic protein (or a multidomain therapeutic protein comprising a sequence) at least 90%, at least 91%, at least 92%, at least 93%, at least 94%, at least 95%, at least 96%, at least 97%, at least 98%, at least 99%, at least 99.5%, or 100% identical to SEQ ID NO: 841 (and, e.g., retaining the activity of native ASM). Optionally, the multidomain therapeutic protein coding sequence encodes a multidomain therapeutic protein (or a multidomain therapeutic protein comprising a sequence) at least 95%, at least 96%, at least 97%, at least 98%, at least 99%, at least 99.5%, or 100% identical to SEQ ID NO: 841 (and, e.g., retaining the activity of native ASM). Optionally, the multidomain therapeutic protein coding sequence in the above examples encodes a multidomain therapeutic protein (or a multidomain therapeutic protein comprising a sequence) at least 99%, at least 99.5%, or 100% identical to SEQ ID NO: 841 (and, e.g., retaining the activity of native ASM). Optionally, the multidomain therapeutic protein coding sequence in the above examples encodes a multidomain therapeutic protein comprising the sequence set forth in SEQ ID NO: 841. Optionally, the multidomain therapeutic protein coding sequence in the above examples encodes a multidomain therapeutic protein consisting essentially of the sequence set forth in SEQ ID NO: 841. Optionally, the multidomain therapeutic protein coding sequence in the above examples encodes a multidomain therapeutic protein consisting of the sequence set forth in SEQ ID NO: 841.

[0417] In some cases, the multidomain therapeutic proteins are anti-hTfR:ASM scFv fusion proteins (e.g., in the format V_{H}-linker-V_{L}-(Gly₄Ser)₂(SEQ ID NO: 617)-ASM). In a specific example of a multidomain therapeutic protein nucleic acid construct, the encoded multidomain therapeutic protein can comprise SEQ ID NO: 855 or can be at least 90%, at least 91%, at least 92%, at least 93%, at least 94%, at least 95%, at least 96%, at least 97%, at least 98%, at least 99%, or at least 99.5% identical to SEQ ID NO: 855. In another specific example, the multidomain therapeutic protein can consist essentially of SEQ ID NO: 855. In another specific example, the multidomain therapeutic protein can consist of SEQ ID NO: 855.

[0418] In some cases, the multidomain therapeutic proteins are ASM:anti-hTfR Fab fusion proteins (e.g., in the format ASM-linker-HC-linker-LC). In a specific example of a multidomain therapeutic protein nucleic acid construct, the encoded multidomain therapeutic protein can comprise SEQ ID NO: 843 or can be at least 90%, at least 91%, at least 92%, at least 93%, at least 94%, at least 95%, at least 96%, at least 97%, at least 98%, at least 99%, or at least 99.5% identical to SEQ ID NO: 843. In another specific example, the multidomain therapeutic protein can consist essentially of SEQ ID NO: 843. In another specific example, the multidomain therapeutic protein can consist of SEQ ID NO: 843.

[0419] In some cases, the multidomain therapeutic proteins are ASM:anti-hTfR Fab fusion proteins (e.g., in the format ASM-linker-LC-linker-HC). In a specific example of a multidomain therapeutic protein nucleic acid construct, the encoded multidomain therapeutic protein can comprise SEQ ID NO: 845 or can be at least 90%, at least 91%, at least 92%, at least 93%, at least 94%, at least 95%, at least 96%, at least 97%, at least 98%, at least 99%, or at least 99.5% identical to SEQ ID NO: 845. In another specific example, the multidomain therapeutic protein can consist essentially of SEQ ID NO: 845. In another specific example, the multidomain therapeutic protein can consist of SEQ ID NO: 845.

[0420] In some cases, the multidomain therapeutic proteins are ASM:anti-hTfR scFv fusion proteins (e.g., in the format ASM-(Gly₄Ser)₂(SEQ ID NO: 617)-V_{L}-linker-V_{H}). In a specific example of a multidomain therapeutic protein nucleic acid construct, the encoded multidomain therapeutic protein can comprise SEQ ID NO: 847 or can be at least 90%, at least 91%, at least 92%, at least 93%, at least 94%, at least 95%, at least 96%, at least 97%, at least 98%, at least 99%, or at least 99.5% identical to SEQ ID NO: 847. In another specific example, the multidomain therapeutic protein can consist essentially of SEQ ID NO: 847. In another specific example, the multidomain therapeutic protein can consist of SEQ ID NO: 847.

[0421] In some cases, the multidomain therapeutic proteins are ASM:anti-hTfR scFv fusion proteins (e.g., in the format ASM-(2XH4 linker)-V_{L}-linker-V_{H}). In a specific example of a multidomain therapeutic protein nucleic acid construct, the encoded multidomain therapeutic protein can comprise SEQ ID NO: 851 or can be at least 90%, at least 91%, at least 92%, at least 93%, at least 94%, at least 95%, at least 96%, at least 97%, at least 98%, at least 99%, or at least 99.5% identical to SEQ ID NO: 851. In another specific example, the multidomain therapeutic protein can consist essentially of SEQ ID NO: 851. In another specific example, the multidomain therapeutic protein can consist of SEQ ID NO: 851.

[0422] In some cases, the multidomain therapeutic proteins are ASM:anti-hTfR scFv fusion proteins (e.g., in the format ASM-(Gly₄Ser)₃(SEQ ID NO: 616)-V_{L}-linker-V_{H}). In a specific example of a multidomain therapeutic protein nucleic acid construct, the encoded multidomain therapeutic protein can comprise SEQ ID NO: 853 or can be at least 90%, at least 91%, at least 92%, at least 93%, at least 94%, at least 95%, at least 96%, at least 97%, at least 98%, at least 99%, or at least 99.5% identical to SEQ ID NO: 853. In another specific example, the multidomain therapeutic protein can consist essentially of SEQ ID NO: 853. In another specific example, the multidomain therapeutic protein can consist of SEQ ID NO: 853.

[0423] When specific multidomain therapeutic protein nucleic acid constructs sequences are disclosed herein, they are meant to encompass the sequence disclosed or the reverse complement of the sequence. For example, if a multidomain therapeutic protein nucleic acid construct disclosed herein consists of the hypothetical sequence 5′-CTGGACCGA-3′, it is also meant to encompass the reverse complement of that sequence (5′-TCGGTCCAG-3′). Likewise, when construct elements are disclosed herein in a specific 5′ to 3′ order, they are also meant to encompass the reverse complement of the order of those elements. One reason for this is that, in many embodiments disclosed herein, the multidomain therapeutic protein nucleic acid constructs are part of a single-stranded recombinant AAV vector. Single-stranded AAV genomes are packaged as either sense (plus-stranded) or anti-sense (minus-stranded genomes), and single-stranded AAV genomes of + and −polarity are packaged with equal frequency into mature rAAV virions. See, e.g., LING et al. (2015) J. Mol. Genet. Med. 9(3):175, Zhou et al. (2008) Mol. Ther. 16(3):494-499, and Samulski et al. (1987) J. Virol. 61:3096-3101, each of which is herein incorporated by reference in its entirety for all purposes.

### (5) Vectors

[0424] The nucleic acid constructs disclosed herein can be provided in a vector for expression or for integration into and expression from a target genomic locus. A vector can comprise additional sequences such as, for example, replication origins, promoters, and genes encoding antibiotic resistance. A vector can also comprise nuclease agent components as disclosed elsewhere herein. For example, a vector can comprise a nucleic acid construct encoding a multidomain therapeutic protein, a CRISPR/Cas system (nucleic acids encoding Cas protein and gRNA), one or more components of a CRISPR/Cas system, or a combination thereof (e.g., a nucleic acid construct and a gRNA). In some cases, a vector comprising a nucleic acid construct encoding a multidomain therapeutic protein does not comprise any components of the nuclease agents described herein (e.g., does not comprise a nucleic acid encoding a Cas protein and does not comprise a nucleic acid encoding a gRNA). Some such vectors comprise homology arms corresponding to target sites in the target genomic locus. Other such vectors do not comprise any homology arms.

[0425] Some vectors may be circular. Alternatively, the vector may be linear. The vector can be packaged for delivered via a lipid nanoparticle, liposome, non-lipid nanoparticle, or viral capsid. Non-limiting exemplary vectors include plasmids, phagemids, cosmids, artificial chromosomes, minichromosomes, transposons, viral vectors, and expression vectors.

[0426] The vectors can be, for example, viral vectors such as adeno-associated virus (AAV) vectors. The AAV may be any suitable serotype and may be a single-stranded AAV (ssAAV) or a self-complementary AAV (scAAV). Other exemplary viruses/viral vectors include retroviruses, lentiviruses, adenoviruses, vaccinia viruses, poxviruses, and herpes simplex viruses. The viruses can infect dividing cells, non-dividing cells, or both dividing and non-dividing cells. The viruses can integrate into the host genome or alternatively do not integrate into the host genome. Such viruses can also be engineered to have reduced immunity. The viruses can be replication-competent or can be replication-defective (e.g., defective in one or more genes necessary for additional rounds of virion replication and/or packaging). Viruses can cause transient expression or longer-lasting expression. Viral vector may be genetically modified from their wild type counterparts. For example, the viral vector may comprise an insertion, deletion, or substitution of one or more nucleotides to facilitate cloning or such that one or more properties of the vector is changed. Such properties may include packaging capacity, transduction efficiency, immunogenicity, genome integration, replication, transcription, and translation. In some examples, a portion of the viral genome may be deleted such that the virus is capable of packaging exogenous sequences having a larger size. In some examples, the viral vector may have an enhanced transduction efficiency. In some examples, the immune response induced by the virus in a host may be reduced. In some examples, viral genes (such as integrase) that promote integration of the viral sequence into a host genome may be mutated such that the virus becomes non-integrating. In some examples, the viral vector may be replication defective. In some examples, the viral vector may comprise exogenous transcriptional or translational control sequences to drive expression of coding sequences on the vector. In some examples, the virus may be helper-dependent. For example, the virus may need one or more helper virus to supply viral components (such as viral proteins) required to amplify and package the vectors into viral particles. In such a case, one or more helper components, including one or more vectors encoding the viral components, may be introduced into a host cell or population of host cells along with the vector system described herein. In other examples, the virus may be helper-free. For example, the virus may be capable of amplifying and packaging the vectors without a helper virus. In some examples, the vector system described herein may also encode the viral components required for virus amplification and packaging.

[0427] Exemplary viral titers (e.g., AAV titers) include about 10¹² to about 10¹⁶ vg/mL. Other exemplary viral titers (e.g., AAV titers) include about 10¹² to about 10¹⁶ vg/kg of body weight.

[0428] Adeno-associated viruses (AAVs) are endemic in multiple species including human and non-human primates (NHPs). At least 12 natural serotypes and hundreds of natural variants have been isolated and characterized to date. See, e.g., Li et al. (2020) Nat. Rev. Genet. 21:255-272, herein incorporated by reference in its entirety for all purposes. AAV particles are naturally composed of a non-enveloped icosahedral protein capsid containing a single-stranded DNA (ssDNA) genome. The DNA genome is flanked by two inverted terminal repeats (ITRs) which serve as the viral origins of replication and packaging signals. The rep gene encodes four proteins required for viral replication and packaging whilst the cap gene encodes the three structural capsid subunits which dictate the AAV serotype, and the Assembly Activating Protein (AAP) which promotes virion assembly in some serotypes.

[0429] Recombinant AAV (rAAV) is currently one of the most commonly used viral vectors used in gene therapy to treat human diseases by delivering therapeutic transgenes to target cells in vivo. Indeed, rAAV vectors are composed of icosahedral capsids similar to natural AAVs, but rAAV virions do not encapsidate AAV protein-coding or AAV replicating sequences. These viral vectors are non-replicating. The only viral sequences required in rAAV vectors are the two ITRs, which are needed to guide genome replication and packaging during manufacturing of the rAAV vector. rAAV genomes are devoid of AAV rep and cap genes, rendering them non-replicating in vivo. rAAV vectors are produced by expressing rep and cap genes along with additional viral helper proteins in trans, in combination with the intended transgene cassette flanked by AAV ITRs.

[0430] In therapeutic rAAV genomes, a gene expression cassette is placed between ITR sequences. Typically, rAAV genome cassettes comprise of a promoter to drive expression of a therapeutic transgene, followed by polyadenylation sequence. The ITRs flanking a rAAV expression cassette are usually derived from AAV2, the first serotype to be isolated and converted into a recombinant viral vector. Since then, most rAAV production methods rely on AAV2 Rep-based packaging systems. See, e.g., Colella et al. (2017) Mol. Ther. Methods Clin. Dev. 8:87-104, herein incorporated by reference in its entirety for all purposes.

[0431] Some non-limiting examples of ITRs that can be used include ITRs comprising, consisting essentially of, or consisting of SEQ ID NO: 158, SEQ ID NO: 159, or SEQ ID NO: 160. Other examples of ITRs comprise one or more mutations compared to SEQ ID NO: 158, SEQ ID NO: 159, or SEQ ID NO: 160 and can be at least 90%, at least 91%, at least 92%, at least 93%, at least 94%, at least 95%, at least 96%, at least 97%, at least 98%, or at least 99% identical to SEQ ID NO: 158, SEQ ID NO: 159, or SEQ ID NO: 160. In some rAAV genomes disclosed herein, the nucleic acid construct is flanked on both sides by the same ITR (i.e., the ITR on the 5′ end, and the reverse complement of the ITR on the 3′ end, such as SEQ ID NO: 158 on the 5′ end and SEQ ID NO: 168 on the 3′ end, or SEQ ID NO: 159 on the 5′ end and SEQ ID NO: 613 on the 3′ end, or SEQ ID NO: 160 on the 5′ end and SEQ ID NO: 614 on the 3′ end). In one example, the ITR on each end can comprise, consist essentially of, or consist of SEQ ID NO: 158 (i.e., SEQ ID NO: 158 on the 5′ end, and the reverse complement on the 3′ end). In another example, the ITR on each end can comprise, consist essentially of, or consist of SEQ ID NO: 159 (i.e., SEQ ID NO: 159 on the 5′ end, and the reverse complement on the 3′ end). In one example, the ITR on at least one end comprises, consists essentially of, or consists of SEQ ID NO: 160. In one example, the ITR on the 5′ end comprises, consists essentially of, or consists of SEQ ID NO: 160. In one example, the ITR on the 3′ end comprises, consists essentially of, or consists of SEQ ID NO: 160. In one example, the ITR on each end can comprise, consist essentially of, or consist of SEQ ID NO: 160 (i.e., SEQ ID NO: 160 on the 5′ end, and the reverse complement on the 3′ end). In other rAAV genomes disclosed herein, the nucleic acid construct is flanked by different ITRs on each end. In one example, the ITR on one end comprises, consists essentially of, or consists of SEQ ID NO: 158, and the ITR on the other end comprises, consists essentially of, or consists of SEQ ID NO: 159. In another example, the ITR on one end comprises, consists essentially of, or consists of SEQ ID NO: 158, and the ITR on the other end comprises, consists essentially of, or consists of SEQ ID NO: 160. In one example, the ITR on one end comprises, consists essentially of, or consists of SEQ ID NO: 159, and the ITR on the other end comprises, consists essentially of, or consists of SEQ ID NO: 160.

[0432] The specific serotype of a recombinant AAV vector influences its in vivo tropism to specific tissues. AAV capsid proteins are responsible for mediating attachment and entry into target cells, followed by endosomal escape and trafficking to the nucleus. Thus, the choice of serotype when developing a rAAV vector will influence what cell types and tissues the vector is most likely to bind to and transduce when injected in vivo. Several serotypes of rAAVs, including rAAV8, are capable of transducing the liver when delivered systemically in mice, NHPs and humans. See, e.g., Li et al. (2020) Nat. Rev. Genet. 21:255-272, herein incorporated by reference in its entirety for all purposes.

[0433] Once in the nucleus, the ssDNA genome is released from the virion and a complementary DNA strand is synthesized to generate a double-stranded DNA (dsDNA) molecule. Double-stranded AAV genomes naturally circularize via their ITRs and become episomes which will persist extrachromosomally in the nucleus. Therefore, for episomal gene therapy programs, rAAV-delivered rAAV episomes provide long-term, promoter-driven gene expression in non-dividing cells. However, this rAAV-delivered episomal DNA is diluted out as cells divide. In contrast, the gene therapy described herein is based on gene insertion to allow long-term gene expression.

[0434] When specific rAAVs comprising specific sequences (e.g., specific bidirectional construct sequences or specific unidirectional construct sequences) are disclosed herein, they are meant to encompass the sequence disclosed or the reverse complement of the sequence. For example, if a bidirectional or unidirectional construct disclosed herein consists of the hypothetical sequence 5′-CTGGACCGA-3′, it is also meant to encompass the reverse complement of that sequence (5′-TCGGTCCAG-3′). Likewise, when rAAVs comprising bidirectional or unidirectional construct elements in a specific 5′ to 3′ order are disclosed herein, they are also meant to encompass the reverse complement of the order of those elements. For example, if an rAAV is disclosed herein that comprises a bidirectional construct that comprises from 5′ to 3′ a first splice acceptor, a first coding sequence, a first terminator, a reverse complement of a second terminator, a reverse complement of a second coding sequence, and a reverse complement of a second splice acceptor, it is also meant to encompass a construct comprising from 5′ to 3′ the second splice acceptor, the second coding sequence, the second terminator, a reverse complement of the first terminator, a reverse complement of the first coding sequence, and a reverse complement of the first splice acceptor. Single-stranded AAV genomes are packaged as either sense (plus-stranded) or anti-sense (minus-stranded genomes), and single-stranded AAV genomes of + and −polarity are packaged with equal frequency into mature rAAV virions. See, e.g., LING et al. (2015) J. Mol. Genet. Med. 9(3):175, Zhou et al. (2008) Mol. Ther. 16(3):494-499, and Samulski et al. (1987) J. Virol. 61:3096-3101, each of which is herein incorporated by reference in its entirety for all purposes.

[0435] The ssDNA AAV genome consists of two open reading frames, Rep and Cap, flanked by two inverted terminal repeats that allow for synthesis of the complementary DNA strand. When constructing an AAV transfer plasmid, the transgene is placed between the two ITRs, and Rep and Cap can be supplied in trans. In addition to Rep and Cap, AAV can require a helper plasmid containing genes from adenovirus. These genes (E4, E2a, and VA) mediate AAV replication. For example, the transfer plasmid, Rep/Cap, and the helper plasmid can be transfected into HEK293 cells containing the adenovirus gene E1+ to produce infectious AAV particles. Alternatively, the Rep, Cap, and adenovirus helper genes may be combined into a single plasmid. Similar packaging cells and methods can be used for other viruses, such as retroviruses.

[0436] Multiple serotypes of AAV have been identified. These serotypes differ in the types of cells they infect (i.e., their tropism), allowing preferential transduction of specific cell types. The term AAV includes, for example, AAV1, AAV2, AAV3, AAV3B, AAV4, AAV5, AAV6, AAV6.2, AAV7, AAVrh.64R1, AAVhu.37, AAVrh.8, AAVrh.32.33, AAV8, AAV9, AAV-DJ, AAV2/8, AAVrh10, AAVLK03, AV10, AAV11, AAV12, rh10, and hybrids thereof, avian AAV, bovine AAV, canine AAV, equine AAV, primate AAV, non-primate AAV, and ovine AAV. The genomic sequences of various serotypes of AAV, as well as the sequences of the native terminal repeats (TRs), Rep proteins, and capsid subunits are known in the art. Such sequences may be found in the literature or in public databases such as GenBank. An “AAV vector” as used herein refers to an AAV vector comprising a heterologous sequence not of AAV origin (i.e., a nucleic acid sequence heterologous to AAV), typically comprising a sequence encoding an exogenous polypeptide of interest (e.g., multidomain therapeutic protein). The construct may comprise an AAV1, AAV2, AAV3, AAV3B, AAV4, AAV5, AAV6, AAV6.2, AAV7, AAVrh.64R1, AAVhu.37, AAVrh.8, AAVrh.32.33, AAV8, AAV9, AAV-DJ, AAV2/8, AAVrh10, AAVLK03, AV10, AAV11, AAV12, rh10, and hybrids thereof, avian AAV, bovine AAV, canine AAV, equine AAV, primate AAV, non-primate AAV, and ovine AAV capsid sequence. In general, the heterologous nucleic acid sequence (the transgene) is flanked by at least one, and generally by two, AAV inverted terminal repeat sequences (ITRs). An AAV vector may either be single-stranded (ssAAV) or self-complementary (scAAV). Examples of serotypes for liver tissue include AAV3B, AAV5, AAV6, AAV7, AAV8, AAV9, AAVrh.74, and AAVhu.37, and particularly AAV8. In a specific example, the AAV vector comprising the nucleic acid construct can be recombinant AAV8 (rAAV8). A rAAV8 vector as described herein is one in which the capsid is from AAV8. For example, an AAV vector using ITRs from AAV2 and a capsid of AAV8 is considered herein to be a rAAV8 vector.

[0437] Tropism can be further refined through pseudotyping, which is the mixing of a capsid and a genome from different viral serotypes. For example, AAV2/5 indicates a virus containing the genome of serotype 2 packaged in the capsid from serotype 5. Use of pseudotyped viruses can improve transduction efficiency, as well as alter tropism. Hybrid capsids derived from different serotypes can also be used to alter viral tropism. For example, AAV-DJ contains a hybrid capsid from eight serotypes and displays high infectivity across a broad range of cell types in vivo. AAV-DJ8 is another example that displays the properties of AAV-DJ but with enhanced brain uptake. AAV serotypes can also be modified through mutations. Examples of mutational modifications of AAV2 include Y444F, Y500F, Y730F, and S662V. Examples of mutational modifications of AAV3 include Y705F, Y731F, and T492V. Examples of mutational modifications of AAV6 include S663V and T492V. Other pseudotyped/modified AAV variants include AAV2/1, AAV2/6, AAV2/7, AAV2/8, AAV2/9, AAV2.5, AAV8.2, and AAV/SASTG.

[0438] To accelerate transgene expression, self-complementary AAV (scAAV) variants can be used. Because AAV depends on the cell's DNA replication machinery to synthesize the complementary strand of the AAV's single-stranded DNA genome, transgene expression may be delayed. To address this delay, scAAV containing complementary sequences that are capable of spontaneously annealing upon infection can be used, eliminating the requirement for host cell DNA synthesis. However, single-stranded AAV (ssAAV) vectors can also be used.

[0439] To increase packaging capacity, longer transgenes may be split between two AAV transfer plasmids, the first with a 3′ splice donor and the second with a 5′ splice acceptor. Upon co-infection of a cell, these viruses form concatemers, are spliced together, and the full-length transgene can be expressed. Although this allows for longer transgene expression, expression is less efficient. Similar methods for increasing capacity utilize homologous recombination. For example, a transgene can be divided between two transfer plasmids but with substantial sequence overlap such that co-expression induces homologous recombination and expression of the full-length transgene.

### B. Nuclease Agents and CRISPR/Cas Systems

[0440] The methods and compositions disclosed herein can utilize nuclease agents such as Clustered Regularly Interspersed Short Palindromic Repeats (CRISPR)/CRISPR-associated (Cas) systems, zinc finger nuclease (ZFN) systems, or Transcription Activator-Like Effector Nuclease (TALEN) systems or components of such systems to modify a target genomic locus in a target gene such as a safe harbor gene (e.g., ALB) for insertion of a nucleic acid construct as disclosed herein. Generally, the nuclease agents involve the use of engineered cleavage systems to induce a double strand break or a nick (i.e., a single strand break) in a nuclease target site. Cleavage or nicking can occur through the use of specific nucleases such as engineered ZFNs, TALENs, or CRISPR/Cas systems with an engineered guide RNA to guide specific cleavage or nicking of the nuclease target site. Any nuclease agent that induces a nick or double-strand break at a desired target sequence can be used in the methods and compositions disclosed herein. The nuclease agent can be used to create a site of insertion at a desired locus (target gene) within a host genome, at which site the nucleic acid construct is inserted to express the multidomain therapeutic protein.

[0441] In one example, the nuclease agent is a CRISPR/Cas system. In another example, the nuclease agent comprises one or more ZFNs. In yet another example, the nuclease agent comprises one or more TALENs. In a specific example, the CRISPR/Cas systems or components of such systems target an ALB gene or locus (e.g., ALB genomic locus) within a cell, or intron 1 of an ALB gene or locus within a cell. In a more specific example, the CRISPR/Cas systems or components of such systems target a human ALB gene or locus or intron 1 of a human ALB gene or locus within a cell.

[0442] CRISPR/Cas systems include transcripts and other elements involved in the expression of, or directing the activity of, Cas genes. A CRISPR/Cas system can be, for example, a type I, a type II, a type III system, or a type V system (e.g., subtype V-A or subtype V-B). The methods and compositions disclosed herein can employ CRISPR/Cas systems by utilizing CRISPR complexes (comprising a guide RNA (gRNA) complexed with a Cas protein) for site-directed binding or cleavage of nucleic acids. A CRISPR/Cas system targeting an ALB gene or locus comprises a Cas protein (or a nucleic acid encoding the Cas protein) and one or more guide RNAs (or DNAs encoding the one or more guide RNAs), with each of the one or more guide RNAs targeting a different guide RNA target sequence in the target genomic locus (e.g., ALB gene or locus).

[0443] CRISPR/Cas systems used in the compositions and methods disclosed herein can be non-naturally occurring. A non-naturally occurring system includes anything indicating the involvement of the hand of man, such as one or more components of the system being altered or mutated from their naturally occurring state, being at least substantially free from at least one other component with which they are naturally associated in nature, or being associated with at least one other component with which they are not naturally associated. For example, some CRISPR/Cas systems employ non-naturally occurring CRISPR complexes comprising a gRNA and a Cas protein that do not naturally occur together, employ a Cas protein that does not occur naturally, or employ a gRNA that does not occur naturally.

### (1) Target Genomic Loci and Albumin (ALB)

[0444] Any target genomic locus capable of expressing a gene can be used, such as a safe harbor locus (safe harbor gene, such as ALB) or an endogenous SMPD1 locus. The nucleic acid construct can be integrated into any part of the target genomic locus. For example, the nucleic acid construct can be inserted into an intron or an exon of a target genomic locus or can replace one or more introns and/or exons of a target genomic locus. In a specific example, the nucleic acid construct can be integrated into an intron of the target genomic locus, such as the first intron of the target genomic locus (e.g., ALB intron 1). See, e.g., WO 2020/082042, US 2020/0270617, WO 2020/082041, US 2020/0268906, WO 2020/082046, and US 2020/0289628, each of which is herein incorporated by reference in its entirety for all purposes. Constructs integrated into a target genomic locus can be operably linked to an endogenous promoter at the target genomic locus (e.g., the endogenous ALB promoter).

[0445] Interactions between integrated exogenous DNA and a host genome can limit the reliability and safety of integration and can lead to overt phenotypic effects that are not due to the targeted genetic modification but are instead due to unintended effects of the integration on surrounding endogenous genes. For example, randomly inserted transgenes can be subject to position effects and silencing, making their expression unreliable and unpredictable. Likewise, integration of exogenous DNA into a chromosomal locus can affect surrounding endogenous genes and chromatin, thereby altering cell behavior and phenotypes. Safe harbor loci include chromosomal loci where transgenes or other exogenous nucleic acid inserts can be stably and reliably expressed in all tissues of interest without overtly altering cell behavior or phenotype (i.e., without any deleterious effects on the host cell). See, e.g., Sadelain et al. (2012) Nat. Rev. Cancer 12:51-58, herein incorporated by reference in its entirety for all purposes. For example, the safe harbor locus can be one in which expression of the inserted gene sequence is not perturbed by any read-through expression from neighboring genes. For example, safe harbor loci can include chromosomal loci where exogenous DNA can integrate and function in a predictable manner without adversely affecting endogenous gene structure or expression. Safe harbor loci can include extragenic regions or intragenic regions such as, for example, loci within genes that are non-essential, dispensable, or able to be disrupted without overt phenotypic consequences.

[0446] Such safe harbor loci can offer an open chromatin configuration in all tissues and can be ubiquitously expressed during embryonic development and in adults. See, e.g., Zambrowicz et al. (1997) Proc. Natl. Acad. Sci. U.S.A. 94:3789-3794, herein incorporated by reference in its entirety for all purposes. In addition, the safe harbor loci can be targeted with high efficiency, and safe harbor loci can be disrupted with no overt phenotype. Examples of safe harbor loci include ALB, CCR5, HPRT, AAVS1, and Rosa26. See, e.g., U.S. Pat. Nos. 7,888,121; 7,972,854; 7,914,796; 7,951,925; 8,110,379; 8,409,861; 8,586,526; and US Patent Publication Nos. 2003/0232410; 2005/0208489; 2005/0026157; 2006/0063231; 2008/0159996; 2010/00218264; 2012/0017290; 2011/0265198; 2013/0137104; 2013/0122591; 2013/0177983; 2013/0177960; and 2013/0122591, each of which is herein incorporated by reference in its entirety for all purposes. Other examples of target genomic loci include an ALB locus, a EESYR locus, a SARS locus, position 188,083,272 of human chromosome 1 or its non-human mammalian orthologue, position 3,046,320 of human chromosome 10 or its non-human mammalian orthologue, position 67, 328,980 of human chromosome 17 or its non-human mammalian orthologue, an adeno-associated virus site 1 (AAVS1) on chromosome, a naturally occurring site of integration of AAV virus on human chromosome 19 or its non-human mammalian orthologue, a chemokine receptor 5 (CCR5) gene, a chemokine receptor gene encoding an HIV-1 coreceptor, or a mouse Rosa26 locus or its non-murine mammalian orthologue.

[0447] In a specific example, a safe harbor locus is a locus within the genome wherein a gene may be inserted without significant deleterious effects on the host cell such as a hepatocyte (e.g., without causing apoptosis, necrosis, and/or senescence, or without causing more than 5%, 10%, 15%, 20%, 25%, 30%, or 40% apoptosis, necrosis, and/or senescence as compared to a control population of cells). The safe harbor locus can allow overexpression of an exogenous gene without significant deleterious effects on the host cell such as a hepatocyte (e.g., without causing apoptosis, necrosis, and/or senescence, or without causing more than 5%, 10%, 15%, 20%, 25%, 30%, or 40% apoptosis, necrosis, and/or senescence as compared to a control population of cells). A desirable safe harbor locus may be one in which expression of the inserted gene sequence is not perturbed by read-through expression from neighboring genes. The safe harbor may be a human safe harbor (e.g., for a liver tissue or hepatocyte host cell).

[0448] In a specific example, the target genomic locus is an ALB locus, such as intron 1 of an ALB locus. In a more specific example, the target genomic locus is a human ALB locus, such as intron 1 of a human ALB locus (e.g., SEQ ID NO: 4).

### (2) Cas Proteins

[0449] Cas proteins generally comprise at least one RNA recognition or binding domain that can interact with guide RNAs. Cas proteins can also comprise nuclease domains (e.g., DNase domains or RNase domains), DNA-binding domains, helicase domains, protein-protein interaction domains, dimerization domains, and other domains. Some such domains (e.g., DNase domains) can be from a native Cas protein. Other such domains can be added to make a modified Cas protein. A nuclease domain possesses catalytic activity for nucleic acid cleavage, which includes the breakage of the covalent bonds of a nucleic acid molecule. Cleavage can produce blunt ends or staggered ends, and it can be single-stranded or double-stranded. For example, a wild type Cas9 protein will typically create a blunt cleavage product. Alternatively, a wild type Cpf1 protein (e.g., FnCpf1) can result in a cleavage product with a 5-nucleotide 5′ overhang, with the cleavage occurring after the 18th base pair from the PAM sequence on the non-targeted strand and after the 23rd base on the targeted strand. A Cas protein can have full cleavage activity to create a double-strand break at a target genomic locus (e.g., a double-strand break with blunt ends), or it can be a nickase that creates a single-strand break at a target genomic locus.

[0450] Examples of Cas proteins include Cas1, Cas1B, Cas2, Cas3, Cas4, Cas5, Cas5e (CasD), Cas6, Cas6e, Cas6f, Cas7, Cas8al, Cas8a2, Cas8b, Cas8c, Cas9 (Csn1 or Csx12), Cas10, Cas10d, CasF, CasG, CasH, Csy1, Csy2, Csy3, Cse1 (CasA), Cse2 (CasB), Cse3 (CasE), Cse4 (CasC), Csc1, Csc2, Csa5, Csn2, Csm2, Csm3, Csm4, Csm5, Csm6, Cmr1, Cmr3, Cmr4, Cmr5, Cmr6, Csb1, Csb2, Csb3, Csx17, Csx14, Csx10, Csx16, CsaX, Csx3, Csx1, Csx15, Csf1, Csf2, Csf3, Csf4, and Cu1966, and homologs or modified versions thereof.

[0451] An exemplary Cas protein is a Cas9 protein or a protein derived from a Cas9 protein. Cas9 proteins are from a type II CRISPR/Cas system and typically share four key motifs with a conserved architecture. Motifs 1, 2, and 4 are RuvC-like motifs, and motif 3 is an HNH motif. Exemplary Cas9 proteins are from Streptococcus pyogenes, Streptococcus thermophilus, Streptococcus sp., Staphylococcus aureus, Nocardiopsis dassonvillei, Streptomyces pristinaespiralis, Streptomyces viridochromogenes, Streptomyces viridochromogenes, Streptosporangium roseum, Streptosporangium roseum, Alicyclobacillus acidocaldarius, Bacillus pseudomycoides, Bacillus selenitireducens, Exiguobacterium sibiricum, Lactobacillus delbrueckii, Lactobacillus salivarius, Microscilla marina, Burkholderiales bacterium, Polaromonas naphthalenivorans, Polaromonas sp., Crocosphaera watsonii, Cyanothece sp., Microcystis aeruginosa, Synechococcus sp., Acetohalobium arabaticum, Ammonifex degensii, Caldicellulosiruptor becscii, Candidatus Desulforudis, Clostridium botulinum, Clostridium difficile, Finegoldia magna, Natranaerobius thermophilus, Pelotomaculum thermopropionicum, Acidithiobacillus caldus, Acidithiobacillus ferrooxidans, Allochromatium vinosum, Marinobacter sp., Nitrosococcus halophilus, Nitrosococcus watsonii, Pseudoalteromonas haloplanktis, Ktedonobacter racemifer, Methanohalobium evestigatum, Anabaena variabilis, Nodularia spumigena, Nostoc sp., Arthrospira maxima, Arthrospira platensis, Arthrospira sp., Lyngbya sp., Microcoleus chthonoplastes, Oscillatoria sp., Petrotoga mobilis, Thermosipho africanus, Acaryochloris marina, Neisseria meningitidis, or Campylobacter jejuni. Additional examples of the Cas9 family members are described in WO 2014/131833, herein incorporated by reference in its entirety for all purposes. Cas9 from S. pyogenes (SpCas9) (e.g., assigned UniProt accession number Q99ZW2) is an exemplary Cas9 protein. An exemplary SpCas9 protein sequence is set forth in SEQ ID NO: 8 (encoded by the DNA sequence set forth in SEQ ID NO: 9). An exemplary SpCas9 mRNA (cDNA) sequence is set forth in SEQ ID NO: 10. Smaller Cas9 proteins (e.g., Cas9 proteins whose coding sequences are compatible with the maximum AAV packaging capacity when combined with a guide RNA coding sequence and regulatory elements for the Cas9 and guide RNA, such as SaCas9 and CjCas9 and Nme2Cas9) are other exemplary Cas9 proteins. For example, Cas9 from S. aureus (SaCas9) (e.g., assigned UniProt accession number J7RUA5) is another exemplary Cas9 protein. Likewise, Cas9 from Campylobacter jejuni (CjCas9) (e.g., assigned UniProt accession number Q0P897) is another exemplary Cas9 protein. See, e.g., Kim et al. (2017) Nat. Commun. 8:14500, herein incorporated by reference in its entirety for all purposes. SaCas9 is smaller than SpCas9, and CjCas9 is smaller than both SaCas9 and SpCas9. Cas9 from Neisseria meningitidis (Nme2Cas9) is another exemplary Cas9 protein. See, e.g., Edraki et al. (2019) Mol. Cell 73(4):714-726, herein incorporated by reference in its entirety for all purposes. Cas9 proteins from Streptococcus thermophilus (e.g., Streptococcus thermophilus LMD-9 Cas9 encoded by the CRISPR1 locus (St1Cas9) or Streptococcus thermophilus Cas9 from the CRISPR3 locus (St3Cas9)) are other exemplary Cas9 proteins. Cas9 from Francisella novicida (FnCas9) or the RHA Francisella novicida Cas9 variant that recognizes an alternative PAM (E1369R/E1449H/R1556A substitutions) are other exemplary Cas9 proteins. These and other exemplary Cas9 proteins are reviewed, e.g., in Cebrian-Serrano and Davies (2017) Mamm. Genome 28(7):247-261, herein incorporated by reference in its entirety for all purposes. Examples of Cas9 coding sequences, Cas9 mRNAs, and Cas9 protein sequences are provided in WO 2013/176772, WO 2014/065596, WO 2016/106121, WO 2019/067910, WO 2020/082042, US 2020/0270617, WO 2020/082041, US 2020/0268906, WO 2020/082046, and US 2020/0289628, each of which is herein incorporated by reference in its entirety for all purposes. Specific examples of ORFs and Cas9 amino acid sequences are provided in Table 30 at paragraph [0449] WO 2019/067910, and specific examples of Cas9 mRNAs and ORFs are provided in paragraphs [0214]-[0234] of WO 2019/067910. See also WO 2020/082046 A2 (pp. 84-85) and Table 24 in WO 2020/069296, each of which is herein incorporated by reference in its entirety for all purposes. An exemplary SpCas9 protein sequence comprises, consists essentially of, or consists of SEQ ID NO: 11. An exemplary SpCas9 mRNA sequence encoding that SpCas9 protein sequence comprises, consists essentially of, or consists of SEQ ID NO: 12. Another exemplary SpCas9 mRNA sequence encoding that SpCas9 protein sequence comprises, consists essentially of, or consists of SEQ ID NO: 1. Another exemplary SpCas9 mRNA sequence encoding that SpCas9 protein sequence comprises SEQ ID NO: 2. An exemplary SpCas9 coding sequence comprises, consists essentially of, or consists of SEQ ID NO: 3.

[0452] Another example of a Cas protein is a Cpf1 (CRISPR from Prevotella and Francisella 1) protein. Cpf1 is a large protein (about 1300 amino acids) that contains a RuvC-like nuclease domain homologous to the corresponding domain of Cas9 along with a counterpart to the characteristic arginine-rich cluster of Cas9. However, Cpf1 lacks the HNH nuclease domain that is present in Cas9 proteins, and the RuvC-like domain is contiguous in the Cpf1 sequence, in contrast to Cas9 where it contains long inserts including the HNH domain. See, e.g., Zetsche et al. (2015) Cell 163(3):759-771, herein incorporated by reference in its entirety for all purposes. Exemplary Cpf1 proteins are from Francisella tularensis 1, Francisella tularensis subsp. novicida, Prevotella albensis, Lachnospiraceae bacterium MC20171, Butyrivibrio proteoclasticus, Peregrinibacteria bacterium GW2011_GWA2_33_10, Parcubacteria bacterium GW2011_GWC2_44_17, Smithella sp. SCADC, Acidaminococcus sp. BV3L6, Lachnospiraceae bacterium MA2020, Candidatus Methanoplasma termitum, Eubacterium eligens, Moraxella bovoculi 237, Leptospira inadai, Lachnospiraceae bacterium ND2006, Porphyromonas crevioricanis 3, Prevotella disiens, and Porphyromonas macacae. Cpf1 from Francisella novicida U112 (FnCpf1; assigned UniProt accession number A0Q7Q2) is an exemplary Cpf1 protein.

[0453] Another example of a Cas protein is CasX (Cas12e). CasX is an RNA-guided DNA endonuclease that generates a staggered double-strand break in DNA. CasX is less than 1000 amino acids in size. Exemplary CasX proteins are from Deltaproteobacteria (DpbCasX or DpbCas12e) and Planctomycetes (PlmCasX or PlmCas12e). Like Cpf1, CasX uses a single RuvC active site for DNA cleavage. See, e.g., Liu et al. (2019) Nature 566(7743):218-223, herein incorporated by reference in its entirety for all purposes.

[0454] Another example of a Cas protein is CasΦ(CasPhi or Cas12j), which is uniquely found in bacteriophages. CasΦ is less than 1000 amino acids in size (e.g., 700-800 amino acids). CasΦ cleavage generates staggered 5′ overhangs. A single RuvC active site in CasΦ is capable of crRNA processing and DNA cutting. See, e.g., Pausch et al. (2020) Science 369(6501):333-337, herein incorporated by reference in its entirety for all purposes.

[0455] Cas proteins can be wild type proteins (i.e., those that occur in nature), modified Cas proteins (i.e., Cas protein variants), or fragments of wild type or modified Cas proteins. Cas proteins can also be active variants or fragments with respect to catalytic activity of wild type or modified Cas proteins. Active variants or fragments with respect to catalytic activity can comprise at least 80%, 85%, 90%, 91%, 92%, 93%, 94%, 95%, 96%, 97%, 98%, 99% or more sequence identity to the wild type or modified Cas protein or a portion thereof, wherein the active variants retain the ability to cut at a desired cleavage site and hence retain nick-inducing or double-strand-break-inducing activity. Assays for nick-inducing or double-strand-break-inducing activity are known and generally measure the overall activity and specificity of the Cas protein on DNA substrates containing the cleavage site.

[0456] One example of a modified Cas protein is the modified SpCas9-HF1 protein, which is a high-fidelity variant of Streptococcus pyogenes Cas9 harboring alterations (N497A/R661A/Q695A/Q926A) designed to reduce non-specific DNA contacts. See, e.g., Kleinstiver et al. (2016) Nature 529(7587):490-495, herein incorporated by reference in its entirety for all purposes. Another example of a modified Cas protein is the modified eSpCas9 variant (K848A/K1003A/R1060A) designed to reduce off-target effects. See, e.g., Slaymaker et al. (2016) Science 351(6268):84-88, herein incorporated by reference in its entirety for all purposes. Other SpCas9 variants include K855A and K810A/K1003A/R1060A. These and other modified Cas proteins are reviewed, e.g., in Cebrian-Serrano and Davies (2017) Mamm. Genome 28(7):247-261, herein incorporated by reference in its entirety for all purposes. Another example of a modified Cas9 protein is xCas9, which is a SpCas9 variant that can recognize an expanded range of PAM sequences. See, e.g., Hu et al. (2018) Nature 556:57-63, herein incorporated by reference in its entirety for all purposes.

[0457] Cas proteins can be modified to increase or decrease one or more of nucleic acid binding affinity, nucleic acid binding specificity, and enzymatic activity. Cas proteins can also be modified to change any other activity or property of the protein, such as stability. For example, one or more nuclease domains of the Cas protein can be modified, deleted, or inactivated, or a Cas protein can be truncated to remove domains that are not essential for the function of the protein or to optimize (e.g., enhance or reduce) the activity of or a property of the Cas protein.

[0458] Cas proteins can comprise at least one nuclease domain, such as a DNase domain. For example, a wild type Cpf1 protein generally comprises a RuvC-like domain that cleaves both strands of target DNA, perhaps in a dimeric configuration. Likewise, CasX and CasΦ generally comprise a single RuvC-like domain that cleaves both strands of a target DNA. Cas proteins can also comprise at least two nuclease domains, such as DNase domains. For example, a wild type Cas9 protein generally comprises a RuvC-like nuclease domain and an HNH-like nuclease domain. The RuvC and HNH domains can each cut a different strand of double-stranded DNA to make a double-stranded break in the DNA. See, e.g., Jinek et al. (2012) Science 337(6096):816-821, herein incorporated by reference in its entirety for all purposes.

[0459] One or more of the nuclease domains can be deleted or mutated so that they are no longer functional or have reduced nuclease activity. For example, if one of the nuclease domains is deleted or mutated in a Cas9 protein, the resulting Cas9 protein can be referred to as a nickase and can generate a single-strand break within a double-stranded target DNA but not a double-strand break (i.e., it can cleave the complementary strand or the non-complementary strand, but not both). If none of the nuclease domains is deleted or mutated in a Cas9 protein, the Cas9 protein will retain double-strand-break-inducing activity. An example of a mutation that converts Cas9 into a nickase is a D10A (aspartate to alanine at position 10 of Cas9) mutation in the RuvC domain of Cas9 from S. pyogenes. Likewise, H939A (histidine to alanine at amino acid position 839), H840A (histidine to alanine at amino acid position 840), or N863A (asparagine to alanine at amino acid position N863) in the HNH domain of Cas9 from S. pyogenes can convert the Cas9 into a nickase. Other examples of mutations that convert Cas9 into a nickase include the corresponding mutations to Cas9 from S. thermophilus. See, e.g., Sapranauskas et al. (2011) Nucleic Acids Res. 39(21):9275-9282 and WO 2013/141680, each of which is herein incorporated by reference in its entirety for all purposes. Such mutations can be generated using methods such as site-directed mutagenesis, PCR-mediated mutagenesis, or total gene synthesis. Examples of other mutations creating nickases can be found, for example, in WO 2013/176772 and WO 2013/142578, each of which is herein incorporated by reference in its entirety for all purposes.

[0460] Examples of inactivating mutations in the catalytic domains of xCas9 are the same as those described above for SpCas9. Examples of inactivating mutations in the catalytic domains of Staphylococcus aureus Cas9 proteins are also known. For example, the Staphylococcus aureus Cas9 enzyme (SaCas9) may comprise a substitution at position N580 (e.g., N580A substitution) or a substitution at position D10 (e.g., D10A substitution) to generate a Cas nickase. See, e.g., WO 2016/106236, herein incorporated by reference in its entirety for all purposes. Examples of inactivating mutations in the catalytic domains of Nme2Cas9 are also known (e.g., D16A or H588A). Examples of inactivating mutations in the catalytic domains of St1Cas9 are also known (e.g., D9A, D598A, H599A, or N622A). Examples of inactivating mutations in the catalytic domains of St3Cas9 are also known (e.g., D10A or N870A). Examples of inactivating mutations in the catalytic domains of CjCas9 are also known (e.g., combination of D8A or H559A). Examples of inactivating mutations in the catalytic domains of FnCas9 and RHA FnCas9 are also known (e.g., N995A).

[0461] Examples of inactivating mutations in the catalytic domains of Cpf1 proteins are also known. With reference to Cpf1 proteins from Francisella novicida U112 (FnCpf1), Acidaminococcus sp. BV3L6 (AsCpf1), Lachnospiraceae bacterium ND2006 (LbCpf1), and Moraxella bovoculi 237 (MbCpf1 Cpf1), such mutations can include mutations at positions 908, 993, or 1263 of AsCpf1 or corresponding positions in Cpf1 orthologs, or positions 832, 925, 947, or 1180 of LbCpf1 or corresponding positions in Cpf1 orthologs. Such mutations can include, for example one or more of mutations D908A, E993A, and D1263A of AsCpf1 or corresponding mutations in Cpf1 orthologs, or D832A, E925A, D947A, and D1180A of LbCpf1 or corresponding mutations in Cpf1 orthologs. See, e.g., US 2016/0208243, herein incorporated by reference in its entirety for all purposes.

[0462] Examples of inactivating mutations in the catalytic domains of CasX proteins are also known. With reference to CasX proteins from Deltaproteobacteria, D672A, E769A, and D935A (individually or in combination) or corresponding positions in other CasX orthologs are inactivating. See, e.g., Liu et al. (2019) Nature 566(7743):218-223, herein incorporated by reference in its entirety for all purposes.

[0463] Examples of inactivating mutations in the catalytic domains of CasΦ proteins are also known. For example, D371A and D394A, alone or in combination, are inactivating mutations. See, e.g., Pausch et al. (2020) Science 369(6501):333-337, herein incorporated by reference in its entirety for all purposes.

[0464] Cas proteins can also be operably linked to heterologous polypeptides as fusion proteins. For example, a Cas protein can be fused to a cleavage domain. See WO 2014/089290, herein incorporated by reference in its entirety for all purposes Cas proteins can also be fused to a heterologous polypeptide providing increased or decreased stability. The fused domain or heterologous polypeptide can be located at the N-terminus, the C-terminus, or internally within the Cas protein.

[0465] As one example, a Cas protein can be fused to one or more heterologous polypeptides that provide for subcellular localization. Such heterologous polypeptides can include, for example, one or more nuclear localization signals (NLS) such as the monopartite SV40 NLS and/or a bipartite alpha-importin NLS for targeting to the nucleus, a mitochondrial localization signal for targeting to the mitochondria, an ER retention signal, and the like. See, e.g., Lange et al. (2007) J. Biol. Chem. 282(8):5101-5105, herein incorporated by reference in its entirety for all purposes. Such subcellular localization signals can be located at the N-terminus, the C-terminus, or anywhere within the Cas protein. An NLS can comprise a stretch of basic amino acids, and can be a monopartite sequence or a bipartite sequence. Optionally, a Cas protein can comprise two or more NLSs, including an NLS (e.g., an alpha-importin NLS or a monopartite NLS) at the N-terminus and an NLS (e.g., an SV40 NLS or a bipartite NLS) at the C-terminus. A Cas protein can also comprise two or more NLSs at the N-terminus and/or two or more NLSs at the C-terminus.

[0466] A Cas protein may, for example, be fused with 1-10 NLSs (e.g., fused with 1-5 NLSs or fused with one NLS. Where one NLS is used, the NLS may be linked at the N-terminus or the C-terminus of the Cas protein sequence. It may also be inserted within the Cas protein sequence. Alternatively, the Cas protein may be fused with more than one NLS. For example, the Cas protein may be fused with 2, 3, 4, or 5 NLSs. In a specific example, the Cas protein may be fused with two NLSs. In certain circumstances, the two NLSs may be the same (e.g., two SV40 NLSs) or different. For example, the Cas protein can be fused to two SV40 NLS sequences linked at the carboxy terminus. Alternatively, the Cas protein may be fused with two NLSs, one linked at the N-terminus and one at the C-terminus. In other examples, the Cas protein may be fused with 3 NLSs or with no NLS. The NLS may be a monopartite sequence, such as, e.g., the SV40 NLS, PKKKRKV (SEQ ID NO: 13) or PKKKRRV (SEQ ID NO: 14). The NLS may be a bipartite sequence, such as the NLS of nucleoplasmin, KRPAATKKAGQAKKKK (SEQ ID NO: 15). In a specific example, a single PKKKRKV (SEQ ID NO: 13) NLS may be linked at the C-terminus of the Cas protein. One or more linkers are optionally included at the fusion site.

[0467] Cas proteins can also be operably linked to a cell-penetrating domain or protein transduction domain. For example, the cell-penetrating domain can be derived from the HIV-1 TAT protein, the TLM cell-penetrating motif from human hepatitis B virus, MPG, Pep-1, VP22, a cell penetrating peptide from Herpes simplex virus, or a polyarginine peptide sequence. See, e.g., WO 2014/089290 and WO 2013/176772, each of which is herein incorporated by reference in its entirety for all purposes. The cell-penetrating domain can be located at the N-terminus, the C-terminus, or anywhere within the Cas protein.

[0468] Cas proteins can also be operably linked to a heterologous polypeptide for ease of tracking or purification, such as a fluorescent protein, a purification tag, or an epitope tag. Examples of fluorescent proteins include green fluorescent proteins (e.g., GFP, GFP-2, tagGFP, turboGFP, eGFP, Emerald, Azami Green, Monomeric Azami Green, CopGFP, AceGFP, ZsGreen1), yellow fluorescent proteins (e.g., YFP, eYFP, Citrine, Venus, YPet, PhiYFP, ZsYellow1), blue fluorescent proteins (e.g., eBFP, eBFP2, Azurite, mKalamal, GFPuv, Sapphire, T-sapphire), cyan fluorescent proteins (e.g., eCFP, Cerulean, CyPet, AmCyan1, Midoriishi-Cyan), red fluorescent proteins (e.g., mKate, mKate2, mPlum, DsRed monomer, mCherry, mRFP1, DsRed-Express, DsRed2, DsRed-Monomer, HcRed-Tandem, HcRed1, AsRed2, eqFP611, mRaspberry, mStrawberry, Jred), orange fluorescent proteins (e.g., mOrange, mKO, Kusabira-Orange, Monomeric Kusabira-Orange, mTangerine, tdTomato), and any other suitable fluorescent protein. Examples of tags include glutathione-S-transferase (GST), chitin binding protein (CBP), maltose binding protein, thioredoxin (TRX), poly(NANP), tandem affinity purification (TAP) tag, myc, AcV5, AU1, AU5, E, ECS, E2, FLAG, hemagglutinin (HA), nus, Softag 1, Softag 3, Strep, SBP, Glu-Glu, HSV, KT3, S, S1, T7, V5, VSV-G, histidine (His), biotin carboxyl carrier protein (BCCP), and calmodulin.

[0469] Cas proteins can also be tethered to labeled nucleic acids. Such tethering (i.e., physical linking) can be achieved through covalent interactions or noncovalent interactions, and the tethering can be direct (e.g., through direct fusion or chemical conjugation, which can be achieved by modification of cysteine or lysine residues on the protein or intein modification), or can be achieved through one or more intervening linkers or adapter molecules such as streptavidin or aptamers. See, e.g., Pierce et al. (2005) Mini Rev. Med. Chem. 5(1):41-55; Duckworth et al. (2007) Angew. Chem. Int. Ed. Engl. 46(46):8819-8822; Schaeffer and Dixon (2009) Australian J. Chem. 62(10):1328-1332; Goodman et al. (2009) Chembiochem. 10(9):1551-1557; and Khatwani et al. (2012) Bioorg. Med. Chem. 20(14):4532-4539, each of which is herein incorporated by reference in its entirety for all purposes. Noncovalent strategies for synthesizing protein-nucleic acid conjugates include biotin-streptavidin and nickel-histidine methods. Covalent protein-nucleic acid conjugates can be synthesized by connecting appropriately functionalized nucleic acids and proteins using a wide variety of chemistries. Some of these chemistries involve direct attachment of the oligonucleotide to an amino acid residue on the protein surface (e.g., a lysine amine or a cysteine thiol), while other more complex schemes require post-translational modification of the protein or the involvement of a catalytic or reactive protein domain. Methods for covalent attachment of proteins to nucleic acids can include, for example, chemical cross-linking of oligonucleotides to protein lysine or cysteine residues, expressed protein-ligation, chemoenzymatic methods, and the use of photoaptamers. The labeled nucleic acid can be tethered to the C-terminus, the N-terminus, or to an internal region within the Cas protein. In one example, the labeled nucleic acid is tethered to the C-terminus or the N-terminus of the Cas protein. Likewise, the Cas protein can be tethered to the 5′ end, the 3′ end, or to an internal region within the labeled nucleic acid. That is, the labeled nucleic acid can be tethered in any orientation and polarity. For example, the Cas protein can be tethered to the 5′ end or the 3′ end of the labeled nucleic acid.

[0470] Cas proteins can be provided in any form. For example, a Cas protein can be provided in the form of a protein, such as a Cas protein complexed with a gRNA. Alternatively, a Cas protein can be provided in the form of a nucleic acid encoding the Cas protein, such as an RNA (e.g., messenger RNA (mRNA)) or DNA. Optionally, the nucleic acid encoding the Cas protein can be codon optimized for efficient translation into protein in a particular cell or organism. For example, the nucleic acid encoding the Cas protein can be modified to substitute codons having a higher frequency of usage in a bacterial cell, a yeast cell, a human cell, a non-human cell, a mammalian cell, a rodent cell, a mouse cell, a rat cell, or any other host cell of interest, as compared to the naturally occurring polynucleotide sequence. When a nucleic acid encoding the Cas protein is introduced into the cell, the Cas protein can be transiently, conditionally, or constitutively expressed in the cell.

[0471] Nucleic acids encoding Cas proteins can be stably integrated in the genome of a cell and operably linked to a promoter active in the cell. Alternatively, nucleic acids encoding Cas proteins can be operably linked to a promoter in an expression construct. Expression constructs include any nucleic acid constructs capable of directing expression of a gene or other nucleic acid sequence of interest (e.g., a Cas gene) and which can transfer such a nucleic acid sequence of interest to a target cell. For example, the nucleic acid encoding the Cas protein can be in a vector comprising a DNA encoding a gRNA. Alternatively, it can be in a vector or plasmid that is separate from the vector comprising the DNA encoding the gRNA. Promoters that can be used in an expression construct include promoters active, for example, in one or more of a eukaryotic cell, a human cell, a non-human cell, a mammalian cell, a non-human mammalian cell, a rodent cell, a mouse cell, a rat cell, a pluripotent cell, an embryonic stem (ES) cell, an adult stem cell, a developmentally restricted progenitor cell, an induced pluripotent stem (iPS) cell, or a one-cell stage embryo. Such promoters can be, for example, conditional promoters, inducible promoters, constitutive promoters, or tissue-specific promoters. Optionally, the promoter can be a bidirectional promoter driving expression of both a Cas protein in one direction and a guide RNA in the other direction. Such bidirectional promoters can consist of (1) a complete, conventional, unidirectional Pol III promoter that contains 3 external control elements: a distal sequence element (DSE), a proximal sequence element (PSE), and a TATA box; and (2) a second basic Pol III promoter that includes a PSE and a TATA box fused to the 5′ terminus of the DSE in reverse orientation. For example, in the H1 promoter, the DSE is adjacent to the PSE and the TATA box, and the promoter can be rendered bidirectional by creating a hybrid promoter in which transcription in the reverse direction is controlled by appending a PSE and TATA box derived from the U6 promoter. See, e.g., US 2016/0074535, herein incorporated by references in its entirety for all purposes. Use of a bidirectional promoter to express genes encoding a Cas protein and a guide RNA simultaneously allow for the generation of compact expression cassettes to facilitate delivery. In preferred embodiments, promotors are accepted by regulatory authorities for use in humans. In certain embodiments, promotors drive expression in a liver cell.

[0472] Different promoters can be used to drive Cas expression or Cas9 expression. In some methods, small promoters are used so that the Cas or Cas9 coding sequence can fit into an AAV construct. For example, Cas or Cas9 and one or more gRNAs (e.g., 1 gRNA or 2 gRNAs or 3 gRNAs or 4 gRNAs) can be delivered via LNP-mediated delivery (e.g., in the form of RNA) or adeno-associated virus (AAV)-mediated delivery (e.g., AAV2-mediated delivery, AAV5-mediated delivery, AAV8-mediated delivery, or AAV7m8-mediated delivery). For example, the nuclease agent can be CRISPR/Cas9, and a Cas9 mRNA and a gRNA targeting an intron 1 of an endogenous human ALB locus can be delivered via LNP-mediated delivery or AAV-mediated delivery. The Cas or Cas9 and the gRNA(s) can be delivered in a single AAV or via two separate AAVs. For example, a first AAV can carry a Cas or Cas9 expression cassette, and a second AAV can carry a gRNA expression cassette. Similarly, a first AAV can carry a Cas or Cas9 expression cassette, and a second AAV can carry two or more gRNA expression cassettes. Alternatively, a single AAV can carry a Cas or Cas9 expression cassette (e.g., Cas or Cas9 coding sequence operably linked to a promoter) and a gRNA expression cassette (e.g., gRNA coding sequence operably linked to a promoter). Similarly, a single AAV can carry a Cas or Cas9 expression cassette (e.g., Cas or Cas9 coding sequence operably linked to a promoter) and two or more gRNA expression cassettes (e.g., gRNA coding sequences operably linked to promoters). Different promoters can be used to drive expression of the gRNA, such as a U6 promoter or the small tRNA Gln. Likewise, different promoters can be used to drive Cas9 expression. For example, small promoters are used so that the Cas9 coding sequence can fit into an AAV construct. Similarly, small Cas9 proteins (e.g., SaCas9 or CjCas9 are used to maximize the AAV packaging capacity).

[0473] Cas proteins provided as mRNAs can be modified for improved stability and/or immunogenicity properties. The modifications may be made to one or more nucleosides within the mRNA. Examples of chemical modifications to mRNA nucleobases include pseudouridine, 1-methyl-pseudouridine, and 5-methyl-cytidine. mRNA encoding Cas proteins can also be capped. The cap can be, for example, a cap 1 structure in which the +1 ribonucleotide is methylated at the 2′O position of the ribose. The capping can, for example, give superior activity in vivo (e.g., by mimicking a natural cap), can result in a natural structure that reduce stimulation of the innate immune system of the host (e.g., can reduce activation of pattern recognition receptors in the innate immune system). mRNA encoding Cas proteins can also be polyadenylated (to comprise a poly(A) tail). mRNA encoding Cas proteins can also be modified to include pseudouridine (e.g., can be fully substituted with pseudouridine). As another example, capped and polyadenylated Cas mRNA containing N1-methyl-pseudouridine can be used. mRNA encoding Cas proteins can also be modified to include N1-methyl-pseudouridine (e.g., can be fully substituted with N1-methyl-pseudouridine). As another example, Cas mRNA fully substituted with pseudouridine can be used (i.e., all standard uracil residues are replaced with pseudouridine, a uridine isomer in which the uracil is attached with a carbon-carbon bond rather than nitrogen-carbon). As another example, Cas mRNA fully substituted with N1-methyl-pseudouridine can be used (i.e., all standard uracil residues are replaced with N1-methyl-pseudouridine). Likewise, Cas mRNAs can be modified by depletion of uridine using synonymous codons. For example, capped and polyadenylated Cas mRNA fully substituted with pseudouridine can be used. For example, capped and polyadenylated Cas mRNA fully substituted with N1-methyl-pseudouridine can be used.

[0474] Cas mRNAs can comprise a modified uridine at least at one, a plurality of, or all uridine positions. The modified uridine can be a uridine modified at the 5 position (e.g., with a halogen, methyl, or ethyl). The modified uridine can be a pseudouridine modified at the 1 position (e.g., with a halogen, methyl, or ethyl). The modified uridine can be, for example, pseudouridine, N1-methyl-pseudouridine, 5-methoxyuridine, 5-iodouridine, or a combination thereof. In some examples, the modified uridine is 5-methoxyuridine. In some examples, the modified uridine is 5-iodouridine. In some examples, the modified uridine is pseudouridine. In some examples, the modified uridine is N1-methyl-pseudouridine. In some examples, the modified uridine is a combination of pseudouridine and N1-methyl-pseudouridine. In some examples, the modified uridine is a combination of pseudouridine and 5-methoxyuridine. In some examples, the modified uridine is a combination of N1-methyl pseudouridine and 5-methoxyuridine. In some examples, the modified uridine is a combination of 5-iodouridine and N1-methyl-pseudouridine. In some examples, the modified uridine is a combination of pseudouridine and 5-iodouridine. In some examples, the modified uridine is a combination of 5-iodouridine and 5-methoxyuridine.

[0475] Cas mRNAs disclosed herein can also comprise a 5′ cap, such as a Cap0, Cap1, or Cap2. A 5′ cap is generally a 7-methylguanine ribonucleotide (which may be further modified, e.g., with respect to ARCA) linked through a 5′-triphosphate to the 5′ position of the first nucleotide of the 5′-to-3′ chain of the mRNA (i.e., the first cap-proximal nucleotide). In Cap0, the riboses of the first and second cap-proximal nucleotides of the mRNA both comprise a 2′-hydroxyl. In Cap1, the riboses of the first and second transcribed nucleotides of the mRNA comprise a 2′-methoxy and a 2′-hydroxyl, respectively. In Cap2, the riboses of the first and second cap-proximal nucleotides of the mRNA both comprise a 2′-methoxy. See, e.g., Katibah et al. (2014) Proc. Natl. Acad. Sci. U.S.A. 111(33):12025-30 and Abbas et al. (2017) Proc. Natl. Acad. Sci. U.S.A. 114(11):E2106-E2115, each of which is herein incorporated by reference in its entirety for all purposes. Most endogenous higher eukaryotic mRNAs, including mammalian mRNAs such as human mRNAs, comprise Cap1 or Cap2. Cap0 and other cap structures differing from Cap1 and Cap2 may be immunogenic in mammals, such as humans, due to recognition as non-self by components of the innate immune system such as IFIT-1 and IFIT-5, which can result in elevated cytokine levels including type I interferon. Components of the innate immune system such as IFIT-1 and IFIT-5 may also compete with eIF4E for binding of an mRNA with a cap other than Cap1 or Cap2, potentially inhibiting translation of the mRNA.

[0476] A cap can be included co-transcriptionally. For example, ARCA (anti-reverse cap analog; Thermo Fisher Scientific Cat. No. AM8045) is a cap analog comprising a 7-methylguanine 3′-methoxy-5′-triphosphate linked to the 5′ position of a guanine ribonucleotide which can be incorporated in vitro into a transcript at initiation. ARCA results in a Cap0 cap in which the 2′ position of the first cap-proximal nucleotide is hydroxyl. See, e.g., Stepinski et al. (2001) RNA 7:1486-1495, herein incorporated by reference in its entirety for all purposes.

[0477] CleanCap™ AG (m7G(5′)ppp(5′)(2′OMeA)pG; TriLink Biotechnologies Cat. No. N-7113) or CleanCap™ GG (m7G(5′)ppp(5′)(2′OMeG)pG; TriLink Biotechnologies Cat. No. N-7133) can be used to provide a Cap1 structure co-transcriptionally. 3′—O-methylated versions of CleanCap™ AG and CleanCap™ GG are also available from TriLink Biotechnologies as Cat. Nos. N-7413 and N-7433, respectively.

[0478] Alternatively, a cap can be added to an RNA post-transcriptionally. For example, Vaccinia capping enzyme is commercially available (New England Biolabs Cat. No. M2080S) and has RNA triphosphatase and guanylyltransferase activities, provided by its D1 subunit, and guanine methyltransferase, provided by its D12 subunit. As such, it can add a 7-methylguanine to an RNA, so as to give Cap0, in the presence of S-adenosyl methionine and GTP. See, e.g., Guo and Moss (1990) Proc. Natl. Acad. Sci. U.S.A. 87:4023-4027 and Mao and Shuman (1994) J. Biol. Chem. 269:24472-24479, each of which is herein incorporated by reference in its entirety for all purposes.

[0479] Cas mRNAs can further comprise a poly-adenylated (poly-A or poly(A) or poly-adenine) tail. The poly-A tail can, for example, comprise at least 20, at least 30, at least 40, at least 50, at least 60, at least 70, at least 80, at least 90, or at least 100 adenines, and optionally up to 300 adenines. For example, the poly-A tail can comprise 95, 96, 97, 98, 99, or 100 adenine nucleotides.

### (3) Guide RNAs

[0480] A “guide RNA” or “gRNA” is an RNA molecule that binds to a Cas protein (e.g., Cas9 protein) and targets the Cas protein to a specific location within a target DNA. Guide RNAs can comprise two segments: a “DNA-targeting segment” (also called “guide sequence”) and a “protein-binding segment.” “Segment” includes a section or region of a molecule, such as a contiguous stretch of nucleotides in an RNA. Some gRNAs, such as those for Cas9, can comprise two separate RNA molecules: an “activator-RNA” (e.g., tracrRNA) and a “targeter-RNA” (e.g., CRISPR RNA or crRNA). Other gRNAs are a single RNA molecule (single RNA polynucleotide), which can also be called a “single-molecule gRNA,” a “single-guide RNA,” or an “sgRNA.” See, e.g., WO 2013/176772, WO 2014/065596, WO 2014/089290, WO 2014/093622, WO 2014/099750, WO 2013/142578, and WO 2014/131833, each of which is herein incorporated by reference in its entirety for all purposes. A guide RNA can refer to either a CRISPR RNA (crRNA) or the combination of a crRNA and a trans-activating CRISPR RNA (tracrRNA). The crRNA and tracrRNA can be associated as a single RNA molecule (single guide RNA or sgRNA) or in two separate RNA molecules (dual guide RNA or dgRNA). For Cas9, for example, a single-guide RNA can comprise a crRNA fused to a tracrRNA (e.g., via a linker). For Cpf1 and CasΦ, for example, only a crRNA is needed to achieve binding to a target sequence. The terms “guide RNA” and “gRNA” include both double-molecule (i.e., modular) gRNAs and single-molecule gRNAs. In some of the methods and compositions disclosed herein, a gRNA is a S. pyogenes Cas9 gRNA or an equivalent thereof. In some of the methods and compositions disclosed herein, a gRNA is a S. aureus Cas9 gRNA or an equivalent thereof.

[0481] An exemplary two-molecule gRNA comprises a crRNA-like (“CRISPR RNA” or “targeter-RNA” or “crRNA” or “crRNA repeat”) molecule and a corresponding tracrRNA-like (“trans-activating CRISPR RNA” or “activator-RNA” or “tracrRNA”) molecule. A crRNA comprises both the DNA-targeting segment (single-stranded) of the gRNA and a stretch of nucleotides that forms one half of the dsRNA duplex of the protein-binding segment of the gRNA. An example of a crRNA tail (e.g., for use with S. pyogenes Cas9), located downstream (3′) of the DNA-targeting segment, comprises, consists essentially of, or consists of GUUUUAGAGCUAUGCU (SEQ ID NO: 16) or GUUUUAGAGCUAUGCUGUUUUG (SEQ ID NO: 17). Any of the DNA-targeting segments disclosed herein can be joined to the 5′ end of SEQ ID NO: 16 or 17 to form a crRNA.

[0482] A corresponding tracrRNA (activator-RNA) comprises a stretch of nucleotides that forms the other half of the dsRNA duplex of the protein-binding segment of the gRNA. A stretch of nucleotides of a crRNA are complementary to and hybridize with a stretch of nucleotides of a tracrRNA to form the dsRNA duplex of the protein-binding domain of the gRNA. As such, each crRNA can be said to have a corresponding tracrRNA. Examples of tracrRNA sequences (e.g., for use with S. pyogenes Cas9) comprise, consist essentially of, or consist of any one of

(SEQ ID NO: 18)
AGCAUAGCAAGUUAAAAUAAGGCUAGUCCGUUAUCAACUUGAAAAAGUG
GCACCGAGUCGGUGCUUU,
(SEQ ID NO: 19)
AAACAGCAUAGCAAGUUAAAAUAAGGCUAGUCCGUUAUCAACUUGAAAA
AGUGGCACCGAGUCGGUGCUUUU,
or
(SEQ ID NO: 20)
GUUGGAACCAUUCAAAACAGCAUAGCAAGUUAAAAUAAGGCUAGUCCGU
UAUCAACUUGAAAAAGUGGCACCGAGUCGGUGC.

[0483] In systems in which both a crRNA and a tracrRNA are needed, the crRNA and the corresponding tracrRNA hybridize to form a gRNA. In systems in which only a crRNA is needed, the crRNA can be the gRNA. The crRNA additionally provides the single-stranded DNA-targeting segment that hybridizes to the complementary strand of a target DNA. If used for modification within a cell, the exact sequence of a given crRNA or tracrRNA molecule can be designed to be specific to the species in which the RNA molecules will be used. See, e.g., Mali et al. (2013) Science 339(6121):823-826; Jinek et al. (2012) Science 337(6096):816-821; Hwang et al. (2013) Nat. Biotechnol. 31(3):227-229; Jiang et al. (2013) Nat. Biotechnol. 31(3):233-239; and Cong et al. (2013) Science 339(6121):819-823, each of which is herein incorporated by reference in its entirety for all purposes.

[0484] The DNA-targeting segment (crRNA) of a given gRNA comprises a nucleotide sequence that is complementary to a sequence on the complementary strand of the target DNA, as described in more detail below. The DNA-targeting segment of a gRNA interacts with the target DNA in a sequence-specific manner via hybridization (i.e., base pairing). As such, the nucleotide sequence of the DNA-targeting segment may vary and determines the location within the target DNA with which the gRNA and the target DNA will interact. The DNA-targeting segment of a subject gRNA can be modified to hybridize to any desired sequence within a target DNA. Naturally occurring crRNAs differ depending on the CRISPR/Cas system and organism but often contain a targeting segment of between 21 to 72 nucleotides length, flanked by two direct repeats (DR) of a length of between 21 to 46 nucleotides (see, e.g., WO 2014/131833, herein incorporated by reference in its entirety for all purposes). In the case of S. pyogenes, the DRs are 36 nucleotides long and the targeting segment is 30 nucleotides long. The 3′ located DR is complementary to and hybridizes with the corresponding tracrRNA, which in turn binds to the Cas protein.

[0485] The DNA-targeting segment can have, for example, a length of at least about 12, at least about 15, at least about 17, at least about 18, at least about 19, at least about 20, at least about 25, at least about 30, at least about 35, or at least about 40 nucleotides. Such DNA-targeting segments can have, for example, a length from about 12 to about 100, from about 12 to about 80, from about 12 to about 50, from about 12 to about 40, from about 12 to about 30, from about 12 to about 25, or from about 12 to about 20 nucleotides. For example, the DNA targeting segment can be from about 15 to about 25 nucleotides (e.g., from about 17 to about 20 nucleotides, or about 17, 18, 19, or 20 nucleotides). See, e.g., US 2016/0024523, herein incorporated by reference in its entirety for all purposes. For Cas9 from S. pyogenes, a typical DNA-targeting segment is between 16 and 20 nucleotides in length or between 17 and 20 nucleotides in length. For Cas9 from S. aureus, a typical DNA-targeting segment is between 21 and 23 nucleotides in length. For Cpf1, a typical DNA-targeting segment is at least 16 nucleotides in length or at least 18 nucleotides in length.

[0486] In one example, the DNA-targeting segment can be about 20 nucleotides in length. However, shorter and longer sequences can also be used for the targeting segment (e.g., 15-25 nucleotides in length, such as 15, 16, 17, 18, 19, 20, 21, 22, 23, 24, or 25 nucleotides in length). The degree of identity between the DNA-targeting segment and the corresponding guide RNA target sequence (or degree of complementarity between the DNA-targeting segment and the other strand of the guide RNA target sequence) can be, for example, about 75%, about 80%, about 85%, about 90%, about 95%, or 100%. The DNA-targeting segment and the corresponding guide RNA target sequence can contain one or more mismatches. For example, the DNA-targeting segment of the guide RNA and the corresponding guide RNA target sequence can contain 1-4, 1-3, 1-2, 1, 2, 3, or 4 mismatches (e.g., where the total length of the guide RNA target sequence is at least 17, at least 18, at least 19, or at least 20 or more nucleotides). For example, the DNA-targeting segment of the guide RNA and the corresponding guide RNA target sequence can contain 1-4, 1-3, 1-2, 1, 2, 3, or 4 mismatches where the total length of the guide RNA target sequence 20 nucleotides.

[0487] As one example, a guide RNA targeting intron 1 of a human ALB gene can comprise a DNA-targeting segment (i.e., guide sequence) comprising, consisting essentially of, or consisting of the sequence (DNA-targeting segment) set forth in any one of SEQ ID NOS: 30-61. Alternatively, a guide RNA targeting intron 1 of a human ALB gene can comprise a DNA-targeting segment comprising, consisting essentially of, or consisting of at least 17, at least 18, at least 19, or at least 20 contiguous nucleotides of the sequence (DNA-targeting segment) set forth in any one of SEQ ID NOS: 30-61. Alternatively, a guide RNA targeting intron 1 of a human ALB gene can comprise a DNA-targeting segment that is at least 75%, at least 80%, at least 85%, at least 90%, or at least 95% identical to the sequence (DNA-targeting segment) set forth in any one of SEQ ID NOS: 30-61. Alternatively, a guide RNA targeting intron 1 of a human ALB gene can comprise a DNA-targeting segment that is at least 90% or at least 95% identical to the sequence (DNA-targeting segment) set forth in any one of SEQ ID NOS: 30-61. Alternatively, a guide RNA targeting intron 1 of a human ALB gene can comprise a DNA-targeting segment that is at least 75%, at least 80%, at least 85%, at least 90%, or at least 95% identical to at least 17, at least 18, at least 19, or at least 20 contiguous nucleotides of the sequence (DNA-targeting segment) set forth in any one of SEQ ID NOS: 30-61. Alternatively, a guide RNA targeting intron 1 of a human ALB gene can comprise a DNA-targeting segment that is at least 90% or at least 95% identical to at least 17, at least 18, at least 19, or at least 20 contiguous nucleotides of the sequence (DNA-targeting segment) set forth in any one of SEQ ID NOS: 30-61. Alternatively, a guide RNA targeting intron 1 of a human ALB gene can comprise a DNA-targeting segment comprising, consisting essentially of, or consisting of a sequence that differs by no more than 3, no more than 2, or no more than 1 nucleotide from the sequence (DNA-targeting segment) set forth in any one of SEQ ID NOS: 30-61. Alternatively, a guide RNA targeting intron 1 of a human ALB gene can comprise a DNA-targeting segment comprising, consisting essentially of, or consisting of a sequence that differs by no more than 3, no more than 2, or no more than 1 nucleotide from at least 17, at least 18, at least 19, or at least 20 contiguous nucleotides of the sequence (DNA-targeting segment) set forth in any one of SEQ ID NOS: 30-61.

[0488] As another example, a guide RNA targeting intron 1 of a human ALB gene can comprise a DNA-targeting segment (i.e., guide sequence) comprising, consisting essentially of, or consisting of the sequence (DNA-targeting segment) set forth in any one of SEQ ID NOS: 36, 30, 33, and 41. Alternatively, a guide RNA targeting intron 1 of a human ALB gene can comprise a DNA-targeting segment comprising, consisting essentially of, or consisting of at least 17, at least 18, at least 19, or at least 20 contiguous nucleotides of the sequence (DNA-targeting segment) set forth in any one of SEQ ID NOS: 36, 30, 33, and 41. Alternatively, a guide RNA targeting intron 1 of a human ALB gene can comprise a DNA-targeting segment that is at least 75%, at least 80%, at least 85%, at least 90%, or at least 95% identical to the sequence (DNA-targeting segment) set forth in any one of SEQ ID NOS: 36, 30, 33, and 41. Alternatively, a guide RNA targeting intron 1 of a human ALB gene can comprise a DNA-targeting segment that is at least 90% or at least 95% identical to the sequence (DNA-targeting segment) set forth in any one of SEQ ID NOS: 36, 30, 33, and 41. Alternatively, a guide RNA targeting intron 1 of a human ALB gene can comprise a DNA-targeting segment that is at least 75%, at least 80%, at least 85%, at least 90%, or at least 95% identical to at least 17, at least 18, at least 19, or at least 20 contiguous nucleotides of the sequence (DNA-targeting segment) set forth in any one of SEQ ID NOS: 36, 30, 33, and 41. Alternatively, a guide RNA targeting intron 1 of a human ALB gene can comprise a DNA-targeting segment that is at least 90% or at least 95% identical to at least 17, at least 18, at least 19, or at least 20 contiguous nucleotides of the sequence (DNA-targeting segment) set forth in any one of SEQ ID NOS: 36, 30, 33, and 41. Alternatively, a guide RNA targeting intron 1 of a human ALB gene can comprise a DNA-targeting segment comprising, consisting essentially of, or consisting of a sequence that differs by no more than 3, no more than 2, or no more than 1 nucleotide from the sequence (DNA-targeting segment) set forth in any one of SEQ ID NOS: 36, 30, 33, and 41. Alternatively, a guide RNA targeting intron 1 of a human ALB gene can comprise a DNA-targeting segment comprising, consisting essentially of, or consisting of a sequence that differs by no more than 3, no more than 2, or no more than 1 nucleotide from at least 17, at least 18, at least 19, or at least 20 contiguous nucleotides of the sequence (DNA-targeting segment) set forth in any one of SEQ ID NOS: 36, 30, 33, and 41.

[0489] As another example, a guide RNA targeting intron 1 of a human ALB gene can comprise a DNA-targeting segment (i.e., guide sequence) comprising, consisting essentially of, or consisting of the sequence (DNA-targeting segment) set forth in SEQ ID NO: 36. Alternatively, a guide RNA targeting intron 1 of a human ALB gene can comprise a DNA-targeting segment comprising, consisting essentially of, or consisting of at least 17, at least 18, at least 19, or at least 20 contiguous nucleotides of the sequence (DNA-targeting segment) set forth in SEQ ID NO: 36. Alternatively, a guide RNA targeting intron 1 of a human ALB gene can comprise a DNA-targeting segment that is at least 75%, at least 80%, at least 85%, at least 90%, or at least 95% identical to the sequence (DNA-targeting segment) set forth in SEQ ID NO: 36. Alternatively, a guide RNA targeting intron 1 of a human ALB gene can comprise a DNA-targeting segment that is at least 90% or at least 95% identical to the sequence (DNA-targeting segment) set forth in SEQ ID NO: 36. Alternatively, a guide RNA targeting intron 1 of a human ALB gene can comprise a DNA-targeting segment that is at least 75%, at least 80%, at least 85%, at least 90%, or at least 95% identical to at least 17, at least 18, at least 19, or at least 20 contiguous nucleotides of the sequence (DNA-targeting segment) set forth in SEQ ID NO: 36. Alternatively, a guide RNA targeting intron 1 of a human ALB gene can comprise a DNA-targeting segment that is at least 90% or at least 95% identical to at least 17, at least 18, at least 19, or at least 20 contiguous nucleotides of the sequence (DNA-targeting segment) set forth in SEQ ID NO: 36. Alternatively, a guide RNA targeting intron 1 of a human ALB gene can comprise a DNA-targeting segment comprising, consisting essentially of, or consisting of a sequence that differs by no more than 3, no more than 2, or no more than 1 nucleotide from the sequence (DNA-targeting segment) set forth in SEQ ID NO: 36. Alternatively, a guide RNA targeting intron 1 of a human ALB gene can comprise a DNA-targeting segment comprising, consisting essentially of, or consisting of a sequence that differs by no more than 3, no more than 2, or no more than 1 nucleotide from at least 17, at least 18, at least 19, or at least 20 contiguous nucleotides of the sequence (DNA-targeting segment) set forth in SEQ ID NO: 36.

[0490] As another example, a guide RNA targeting intron 1 of a human ALB gene can comprise a DNA-targeting segment (i.e., guide sequence) comprising, consisting essentially of, or consisting of the sequence (DNA-targeting segment) set forth in SEQ ID NO: 30. Alternatively, a guide RNA targeting intron 1 of a human ALB gene can comprise a DNA-targeting segment comprising, consisting essentially of, or consisting of at least 17, at least 18, at least 19, or at least 20 contiguous nucleotides of the sequence (DNA-targeting segment) set forth in SEQ ID NO: 30. Alternatively, a guide RNA targeting intron 1 of a human ALB gene can comprise a DNA-targeting segment that is at least 75%, at least 80%, at least 85%, at least 90%, or at least 95% identical to the sequence (DNA-targeting segment) set forth in SEQ ID NO: 30. Alternatively, a guide RNA targeting intron 1 of a human ALB gene can comprise a DNA-targeting segment that is at least 90% or at least 95% identical to the sequence (DNA-targeting segment) set forth in SEQ ID NO: 30. Alternatively, a guide RNA targeting intron 1 of a human ALB gene can comprise a DNA-targeting segment that is at least 75%, at least 80%, at least 85%, at least 90%, or at least 95% identical to at least 17, at least 18, at least 19, or at least 20 contiguous nucleotides of the sequence (DNA-targeting segment) set forth in SEQ ID NO: 30. Alternatively, a guide RNA targeting intron 1 of a human ALB gene can comprise a DNA-targeting segment that is at least 90% or at least 95% identical to at least 17, at least 18, at least 19, or at least 20 contiguous nucleotides of the sequence (DNA-targeting segment) set forth in SEQ ID NO: 30. Alternatively, a guide RNA targeting intron 1 of a human ALB gene can comprise a DNA-targeting segment comprising, consisting essentially of, or consisting of a sequence that differs by no more than 3, no more than 2, or no more than 1 nucleotide from the sequence (DNA-targeting segment) set forth in SEQ ID NO: 30. Alternatively, a guide RNA targeting intron 1 of a human ALB gene can comprise a DNA-targeting segment comprising, consisting essentially of, or consisting of a sequence that differs by no more than 3, no more than 2, or no more than 1 nucleotide from at least 17, at least 18, at least 19, or at least 20 contiguous nucleotides of the sequence (DNA-targeting segment) set forth in SEQ ID NO: 30.

[0491] As another example, a guide RNA targeting intron 1 of a human ALB gene can comprise a DNA-targeting segment (i.e., guide sequence) comprising, consisting essentially of, or consisting of the sequence (DNA-targeting segment) set forth in SEQ ID NO: 33. Alternatively, a guide RNA targeting intron 1 of a human ALB gene can comprise a DNA-targeting segment comprising, consisting essentially of, or consisting of at least 17, at least 18, at least 19, or at least 20 contiguous nucleotides of the sequence (DNA-targeting segment) set forth in SEQ ID NO: 33. Alternatively, a guide RNA targeting intron 1 of a human ALB gene can comprise a DNA-targeting segment that is at least 75%, at least 80%, at least 85%, at least 90%, or at least 95% identical to the sequence (DNA-targeting segment) set forth in SEQ ID NO: 33. Alternatively, a guide RNA targeting intron 1 of a human ALB gene can comprise a DNA-targeting segment that is at least 90% or at least 95% identical to the sequence (DNA-targeting segment) set forth in SEQ ID NO: 33. Alternatively, a guide RNA targeting intron 1 of a human ALB gene can comprise a DNA-targeting segment that is at least 75%, at least 80%, at least 85%, at least 90%, or at least 95% identical to at least 17, at least 18, at least 19, or at least 20 contiguous nucleotides of the sequence (DNA-targeting segment) set forth in SEQ ID NO: 33. Alternatively, a guide RNA targeting intron 1 of a human ALB gene can comprise a DNA-targeting segment that is at least 90% or at least 95% identical to at least 17, at least 18, at least 19, or at least 20 contiguous nucleotides of the sequence (DNA-targeting segment) set forth in SEQ ID NO: 33. Alternatively, a guide RNA targeting intron 1 of a human ALB gene can comprise a DNA-targeting segment comprising, consisting essentially of, or consisting of a sequence that differs by no more than 3, no more than 2, or no more than 1 nucleotide from the sequence (DNA-targeting segment) set forth in SEQ ID NO: 33. Alternatively, a guide RNA targeting intron 1 of a human ALB gene can comprise a DNA-targeting segment comprising, consisting essentially of, or consisting of a sequence that differs by no more than 3, no more than 2, or no more than 1 nucleotide from at least 17, at least 18, at least 19, or at least 20 contiguous nucleotides of the sequence (DNA-targeting segment) set forth in SEQ ID NO: 33.

[0492] As another example, a guide RNA targeting intron 1 of a human ALB gene can comprise a DNA-targeting segment (i.e., guide sequence) comprising, consisting essentially of, or consisting of the sequence (DNA-targeting segment) set forth in SEQ ID NO: 41. Alternatively, a guide RNA targeting intron 1 of a human ALB gene can comprise a DNA-targeting segment comprising, consisting essentially of, or consisting of at least 17, at least 18, at least 19, or at least 20 contiguous nucleotides of the sequence (DNA-targeting segment) set forth in SEQ ID NO: 41. Alternatively, a guide RNA targeting intron 1 of a human ALB gene can comprise a DNA-targeting segment that is at least 75%, at least 80%, at least 85%, at least 90%, or at least 95% identical to the sequence (DNA-targeting segment) set forth in SEQ ID NO: 41. Alternatively, a guide RNA targeting intron 1 of a human ALB gene can comprise a DNA-targeting segment that is at least 90% or at least 95% identical to the sequence (DNA-targeting segment) set forth in SEQ ID NO: 41. Alternatively, a guide RNA targeting intron 1 of a human ALB gene can comprise a DNA-targeting segment that is at least 75%, at least 80%, at least 85%, at least 90%, or at least 95% identical to at least 17, at least 18, at least 19, or at least 20 contiguous nucleotides of the sequence (DNA-targeting segment) set forth in SEQ ID NO: 41. Alternatively, a guide RNA targeting intron 1 of a human ALB gene can comprise a DNA-targeting segment that is at least 90% or at least 95% identical to at least 17, at least 18, at least 19, or at least 20 contiguous nucleotides of the sequence (DNA-targeting segment) set forth in SEQ ID NO: 41. Alternatively, a guide RNA targeting intron 1 of a human ALB gene can comprise a DNA-targeting segment comprising, consisting essentially of, or consisting of a sequence that differs by no more than 3, no more than 2, or no more than 1 nucleotide from the sequence (DNA-targeting segment) set forth in SEQ ID NO: 41. Alternatively, a guide RNA targeting intron 1 of a human ALB gene can comprise a DNA-targeting segment comprising, consisting essentially of, or consisting of a sequence that differs by no more than 3, no more than 2, or no more than 1 nucleotide from at least 17, at least 18, at least 19, or at least 20 contiguous nucleotides of the sequence (DNA-targeting segment) set forth in SEQ ID NO: 41.

TABLE 5
Human ALB Intron 1 Guide Sequences.

| Guide Sequence | SEQ ID NO: |
|---|---|
| GAGCAACCUCACUCUUGUCU | 30 |
| AUGCAUUUGUUUCAAAAUAU | 31 |
| UGCAUUUGUUUCAAAAUAUU | 32 |
| AUUUAUGAGAUCAACAGCAC | 33 |
| GAUCAACAGCACAGGUUUUG | 34 |
| UUAAAUAAAGCAUAGUGCAA | 35 |
| UAAAGCAUAGUGCAAUGGAU | 36 |
| UAGUGCAAUGGAUAGGUCUU | 37 |
| UACUAAAACUUUAUUUUACU | 38 |
| AAAGUUGAACAAUAGAAAAA | 39 |
| AAUGCAUAAUCUAAGUCAAA | 40 |
| UAAUAAAAUUCAAACAUCCU | 41 |
| GCAUCUUUAAAGAAUUAUUU | 42 |
| UUUGGCAUUUAUUUCUAAAA | 43 |
| UGUAUUUGUGAAGUCUUACA | 44 |
| UCCUAGGUAAAAAAAAAAAA | 45 |
| UAAUUUUCUUUUGCGCACUA | 46 |
| UGACUGAAACUUCACAGAAU | 47 |
| GACUGAAACUUCACAGAAUA | 48 |
| UUCAUUUUAGUCUGUCUUCU | 49 |
| AUUAUCUAAGUUUGAAUAUA | 50 |
| AAUUUUUAAAAUAGUAUUCU | 51 |
| UGAAUUAUUCUUCUGUUUAA | 52 |
| AUCAUCCUGAGUUUUUCUGU | 53 |
| UUACUAAAACUUUAUUUUAC | 54 |
| ACCUUUUUUUUUUUUUACCU | 55 |
| AGUGCAAUGGAUAGGUCUUU | 56 |
| UGAUUCCUACAGAAAAACUC | 57 |
| UGGGCAAGGGAAGAAAAAAA | 58 |
| CCUCACUCUUGUCUGGGCAA | 59 |
| ACCUCACUCUUGUCUGGGCA | 60 |
| UGAGCAACCUCACUCUUGUC | 61 |

TABLE 6
Human ALB Intron 1 sgRNA Sequences.

| Full Sequence | Full Sequence Modified |
|---|---|
| GAGCAACCUCACUCUUGUCUGUUU | mG*mA*mG*CAACCUCACUCUUGUCUGUUUUAGAmGmC |
| UAGAGCUAGAAAUAGCAAGUUAAA | mUmAmGmAmAmAmUmAmGmCAAGUUAAAAUAAGGCU |
| AUAAGGCUAGUCCGUUAUCAACUU | AGUCCGUUAUCAmAmCmUmUmGmAmAmAmAmAmGmU |
| GAAAAAGUGGCACCGAGUCGGUGC | mGmGmCmAmCmCmGmAmGmUmCmGmGmUmGmCmU*m |
| UUUU (SEQ ID NO: 62) | U*mU*mU (SEQ ID NO: 94) |
| AUGCAUUUGUUUCAAAAUAUGUUU | mA*mU*mG*CAUUUGUUUCAAAAUAUGUUUUAGAmGmC |
| UAGAGCUAGAAAUAGCAAGUUAAA | mUmAmGmAmAmAmUmAmGmCAAGUUAAAAUAAGGCU |
| AUAAGGCUAGUCCGUUAUCAACUU | AGUCCGUUAUCAmAmCmUmUmGmAmAmAmAmAmGmU |
| GAAAAAGUGGCACCGAGUCGGUGC | mGmGmCmAmCmCmGmAmGmUmCmGmGmUmGmCmU*m |
| UUUU (SEQ ID NO: 63) | U*mU*mU (SEQ ID NO: 95) |
| UGCAUUUGUUUCAAAAUAUUGUUU | mU*mG*mC*AUUUGUUUCAAAAUAUUGUUUUAGAmGmC |
| UAGAGCUAGAAAUAGCAAGUUAAA | mUmAmGmAmAmAmUmAmGmCAAGUUAAAAUAAGGCU |
| AUAAGGCUAGUCCGUUAUCAACUU | AGUCCGUUAUCAmAmCmUmUmGmAmAmAmAmAmGmU |
| GAAAAAGUGGCACCGAGUCGGUGC | mGmGmCmAmCmCmGmAmGmUmCmGmGmUmGmCmU*m |
| UUUU (SEQ ID NO: 64) | U*mU*mU (SEQ ID NO: 96) |
| AUUUAUGAGAUCAACAGCACGUUU | mA*mU*mU*UAUGAGAUCAACAGCACGUUUUAGAmGmC |
| UAGAGCUAGAAAUAGCAAGUUAAA | mUmAmGmAmAmAmUmAmGmCAAGUUAAAAUAAGGCU |
| AUAAGGCUAGUCCGUUAUCAACUU | AGUCCGUUAUCAmAmCmUmUmGmAmAmAmAmAmGmU |
| GAAAAAGUGGCACCGAGUCGGUGC | mGmGmCmAmCmCmGmAmGmUmCmGmGmUmGmCmU*m |
| UUUU (SEQ ID NO: 65) | U*mU*mU (SEQ ID NO: 97) |
| GAUCAACAGCACAGGUUUUGGUUU | mG*mA*mU*CAACAGCACAGGUUUUGGUUUUAGAmGmC |
| UAGAGCUAGAAAUAGCAAGUUAAA | mUmAmGmAmAmAmUmAmGmCAAGUUAAAAUAAGGCU |
| AUAAGGCUAGUCCGUUAUCAACUU | AGUCCGUUAUCAmAmCmUmUmGmAmAmAmAmAmGmU |
| GAAAAAGUGGCACCGAGUCGGUGC | mGmGmCmAmCmCmGmAmGmUmCmGmGmUmGmCmU*m |
| UUUU (SEQ ID NO: 66) | U*mU*mU (SEQ ID NO: 98) |
| UUAAAUAAAGCAUAGUGCAAGUUU | mU*mU*mA*AAUAAAGCAUAGUGCAAGUUUUAGAmGmC |
| UAGAGCUAGAAAUAGCAAGUUAAA | mUmAmGmAmAmAmUmAmGmCAAGUUAAAAUAAGGCU |
| AUAAGGCUAGUCCGUUAUCAACUU | AGUCCGUUAUCAmAmCmUmUmGmAmAmAmAmAmGmU |
| GAAAAAGUGGCACCGAGUCGGUGC | mGmGmCmAmCmCmGmAmGmUmCmGmGmUmGmCmU*m |
| UUUU (SEQ ID NO: 67) | U*mU*mU (SEQ ID NO: 99) |
| UAAAGCAUAGUGCAAUGGAUGUUU | mU*mA*mA*AGCAUAGUGCAAUGGAUGUUUUAGAmGmC |
| UAGAGCUAGAAAUAGCAAGUUAAA | mUmAmGmAmAmAmUmAmGmCAAGUUAAAAUAAGGCU |
| AUAAGGCUAGUCCGUUAUCAACUU | AGUCCGUUAUCAmAmCmUmUmGmAmAmAmAmAmGmU |
| GAAAAAGUGGCACCGAGUCGGUGC | mGmGmCmAmCmCmGmAmGmUmCmGmGmUmGmCmU*m |
| UUUU (SEQ ID NO: 68) | U*mU*mU (SEQ ID NO: 100) |
| UAGUGCAAUGGAUAGGUCUUGUUU | mU*mA*mG*UGCAAUGGAUAGGUCUUGUUUUAGAmGmC |
| UAGAGCUAGAAAUAGCAAGUUAAA | mUmAmGmAmAmAmUmAmGmCAAGUUAAAAUAAGGCU |
| AUAAGGCUAGUCCGUUAUCAACUU | AGUCCGUUAUCAmAmCmUmUmGmAmAmAmAmAmGmU |
| GAAAAAGUGGCACCGAGUCGGUGC | mGmGmCmAmCmCmGmAmGmUmCmGmGmUmGmCmU*m |
| UUUU (SEQ ID NO: 69) | U*mU*mU (SEQ ID NO: 101) |
| UACUAAAACUUUAUUUUACUGUUU | mU*mA*mC*UAAAACUUUAUUUUACUGUUUUAGAmGmC |
| UAGAGCUAGAAAUAGCAAGUUAAA | mUmAmGmAmAmAmUmAmGmCAAGUUAAAAUAAGGCU |
| AUAAGGCUAGUCCGUUAUCAACUU | AGUCCGUUAUCAmAmCmUmUmGmAmAmAmAmAmGmU |
| GAAAAAGUGGCACCGAGUCGGUGC | mGmGmCmAmCmCmGmAmGmUmCmGmGmUmGmCmU*m |
| UUUU (SEQ ID NO: 70) | U*mU*mU (SEQ ID NO: 102) |
| AAAGUUGAACAAUAGAAAAAGUUU | mA*mA*mA*GUUGAACAAUAGAAAAAGUUUUAGAmGmC |
| UAGAGCUAGAAAUAGCAAGUUAAA | mUmAmGmAmAmAmUmAmGmCAAGUUAAAAUAAGGCU |
| AUAAGGCUAGUCCGUUAUCAACUU | AGUCCGUUAUCAmAmCmUmUmGmAmAmAmAmAmGmU |
| GAAAAAGUGGCACCGAGUCGGUGC | mGmGmCmAmCmCmGmAmGmUmCmGmGmUmGmCmU*m |
| UUUU (SEQ ID NO: 71) | U*mU*mU (SEQ ID NO: 103) |
| AAUGCAUAAUCUAAGUCAAAGUUU | mA*mA*mU*GCAUAAUCUAAGUCAAAGUUUUAGAmGmC |
| UAGAGCUAGAAAUAGCAAGUUAAA | mUmAmGmAmAmAmUmAmGmCAAGUUAAAAUAAGGCU |
| AUAAGGCUAGUCCGUUAUCAACUU | AGUCCGUUAUCAmAmCmUmUmGmAmAmAmAmAmGmU |
| GAAAAAGUGGCACCGAGUCGGUGC | mGmGmCmAmCmCmGmAmGmUmCmGmGmUmGmCmU*m |
| UUUU (SEQ ID NO: 72) | U*mU*mU (SEQ ID NO: 104) |
| UAAUAAAAUUCAAACAUCCUGUUU | mU*mA*mA*UAAAAUUCAAACAUCCUGUUUUAGAmGmC |
| UAGAGCUAGAAAUAGCAAGUUAAA | mUmAmGmAmAmAmUmAmGmCAAGUUAAAAUAAGGCU |
| AUAAGGCUAGUCCGUUAUCAACUU | AGUCCGUUAUCAmAmCmUmUmGmAmAmAmAmAmGmU |
| GAAAAAGUGGCACCGAGUCGGUGC | mGmGmCmAmCmCmGmAmGmUmCmGmGmUmGmCmU*m |
| UUUU (SEQ ID NO: 73) | U*mU*mU (SEQ ID NO: 105) |
| GCAUCUUUAAAGAAUUAUUUGUUU | mG*mC*mA*UCUUUAAAGAAUUAUUUGUUUUAGAmGmC |
| UAGAGCUAGAAAUAGCAAGUUAAA | mUmAmGmAmAmAmUmAmGmCAAGUUAAAAUAAGGCU |
| AUAAGGCUAGUCCGUUAUCAACUU | AGUCCGUUAUCAmAmCmUmUmGmAmAmAmAmAmGmU |
| GAAAAAGUGGCACCGAGUCGGUGC | mGmGmCmAmCmCmGmAmGmUmCmGmGmUmGmCmU*m |
| UUUU (SEQ ID NO: 74) | U*mU*mU (SEQ ID NO: 106) |
| UUUGGCAUUUAUUUCUAAAAGUUU | mU*mU*mU*GGCAUUUAUUUCUAAAAGUUUUAGAmGmC |
| UAGAGCUAGAAAUAGCAAGUUAAA | mUmAmGmAmAmAmUmAmGmCAAGUUAAAAUAAGGCU |
| AUAAGGCUAGUCCGUUAUCAACUU | AGUCCGUUAUCAmAmCmUmUmGmAmAmAmAmAmGmU |
| GAAAAAGUGGCACCGAGUCGGUGC | mGmGmCmAmCmCmGmAmGmUmCmGmGmUmGmCmU*m |
| UUUU (SEQ ID NO: 75) | U*mU*mU (SEQ ID NO: 107) |
| UGUAUUUGUGAAGUCUUACAGUUU | mU*mG*mU*AUUUGUGAAGUCUUACAGUUUUAGAmGmC |
| UAGAGCUAGAAAUAGCAAGUUAAA | mUmAmGmAmAmAmUmAmGmCAAGUUAAAAUAAGGCU |
| AUAAGGCUAGUCCGUUAUCAACUU | AGUCCGUUAUCAmAmCmUmUmGmAmAmAmAmAmGmU |
| GAAAAAGUGGCACCGAGUCGGUGC | mGmGmCmAmCmCmGmAmGmUmCmGmGmUmGmCmU*m |
| UUUU (SEQ ID NO: 76) | U*mU*mU (SEQ ID NO: 108) |
| UCCUAGGUAAAAAAAAAAAAGUUU | mU*mC*mC*UAGGUAAAAAAAAAAAAGUUUUAGAmGmC |
| UAGAGCUAGAAAUAGCAAGUUAAA | mUmAmGmAmAmAmUmAmGmCAAGUUAAAAUAAGGCU |
| AUAAGGCUAGUCCGUUAUCAACUU | AGUCCGUUAUCAmAmCmUmUmGmAmAmAmAmAmGmU |
| GAAAAAGUGGCACCGAGUCGGUGC | mGmGmCmAmCmCmGmAmGmUmCmGmGmUmGmCmU*m |
| UUUU (SEQ ID NO: 77) | U*mU*mU (SEQ ID NO: 109) |
| UAAUUUUCUUUUGCGCACUAGUUU | mU*mA*mA*UUUUCUUUUGCGCACUAGUUUUAGAmGmC |
| UAGAGCUAGAAAUAGCAAGUUAAA | mUmAmGmAmAmAmUmAmGmCAAGUUAAAAUAAGGCU |
| AUAAGGCUAGUCCGUUAUCAACUU | AGUCCGUUAUCAmAmCmUmUmGmAmAmAmAmAmGmU |
| GAAAAAGUGGCACCGAGUCGGUGC | mGmGmCmAmCmCmGmAmGmUmCmGmGmUmGmCmU*m |
| UUUU (SEQ ID NO: 78) | U*mU*mU (SEQ ID NO: 110) |
| UGACUGAAACUUCACAGAAUGUUU | mU*mG*mA*CUGAAACUUCACAGAAUGUUUUAGAmGmC |
| UAGAGCUAGAAAUAGCAAGUUAAA | mUmAmGmAmAmAmUmAmGmCAAGUUAAAAUAAGGCU |
| AUAAGGCUAGUCCGUUAUCAACUU | AGUCCGUUAUCAmAmCmUmUmGmAmAmAmAmAmGmU |
| GAAAAAGUGGCACCGAGUCGGUGC | mGmGmCmAmCmCmGmAmGmUmCmGmGmUmGmCmU*m |
| UUUU (SEQ ID NO: 79) | U*mU*mU (SEQ ID NO: 111) |
| GACUGAAACUUCACAGAAUAGUUU | mG*mA*mC*UGAAACUUCACAGAAUAGUUUUAGAmGmC |
| UAGAGCUAGAAAUAGCAAGUUAAA | mUmAmGmAmAmAmUmAmGmCAAGUUAAAAUAAGGCU |
| AUAAGGCUAGUCCGUUAUCAACUU | AGUCCGUUAUCAmAmCmUmUmGmAmAmAmAmAmGmU |
| GAAAAAGUGGCACCGAGUCGGUGC | mGmGmCmAmCmCmGmAmGmUmCmGmGmUmGmCmU*m |
| UUUU (SEQ ID NO: 80) | U*mU*mU (SEQ ID NO: 112) |
| UUCAUUUUAGUCUGUCUUCUGUUU | mU*mU*mC*AUUUUAGUCUGUCUUCUGUUUUAGAmGmC |
| UAGAGCUAGAAAUAGCAAGUUAAA | mUmAmGmAmAmAmUmAmGmCAAGUUAAAAUAAGGCU |
| AUAAGGCUAGUCCGUUAUCAACUU | AGUCCGUUAUCAmAmCmUmUmGmAmAmAmAmAmGmU |
| GAAAAAGUGGCACCGAGUCGGUGC | mGmGmCmAmCmCmGmAmGmUmCmGmGmUmGmCmU*m |
| UUUU (SEQ ID NO: 81) | U*mU*mU (SEQ ID NO: 113) |
| AUUAUCUAAGUUUGAAUAUAGUUU | mA*mU*mU*AUCUAAGUUUGAAUAUAGUUUUAGAmGmC |
| UAGAGCUAGAAAUAGCAAGUUAAA | mUmAmGmAmAmAmUmAmGmCAAGUUAAAAUAAGGCU |
| AUAAGGCUAGUCCGUUAUCAACUU | AGUCCGUUAUCAmAmCmUmUmGmAmAmAmAmAmGmU |
| GAAAAAGUGGCACCGAGUCGGUGC | mGmGmCmAmCmCmGmAmGmUmCmGmGmUmGmCmU*m |
| UUUU (SEQ ID NO: 82) | U*mU*mU (SEQ ID NO: 114) |
| AAUUUUUAAAAUAGUAUUCUGUUU | mA*mA*mU*UUUUAAAAUAGUAUUCUGUUUUAGAmGmC |
| UAGAGCUAGAAAUAGCAAGUUAAA | mUmAmGmAmAmAmUmAmGmCAAGUUAAAAUAAGGCU |
| AUAAGGCUAGUCCGUUAUCAACUU | AGUCCGUUAUCAmAmCmUmUmGmAmAmAmAmAmGmU |
| GAAAAAGUGGCACCGAGUCGGUGC | mGmGmCmAmCmCmGmAmGmUmCmGmGmUmGmCmU*m |
| UUUU (SEQ ID NO: 83) | U*mU*mU (SEQ ID NO: 115) |
| UGAAUUAUUCUUCUGUUUAAGUUU | mU*mG*mA*AUUAUUCUUCUGUUUAAGUUUUAGAmGmC |
| UAGAGCUAGAAAUAGCAAGUUAAA | mUmAmGmAmAmAmUmAmGmCAAGUUAAAAUAAGGCU |
| AUAAGGCUAGUCCGUUAUCAACUU | AGUCCGUUAUCAmAmCmUmUmGmAmAmAmAmAmGmU |
| GAAAAAGUGGCACCGAGUCGGUGC | mGmGmCmAmCmCmGmAmGmUmCmGmGmUmGmCmU*m |
| UUUU (SEQ ID NO: 84) | U*mU*mU (SEQ ID NO: 116) |
| AUCAUCCUGAGUUUUUCUGUGUUU | mA*mU*mC*AUCCUGAGUUUUUCUGUGUUUUAGAmGmC |
| UAGAGCUAGAAAUAGCAAGUUAAA | mUmAmGmAmAmAmUmAmGmCAAGUUAAAAUAAGGCU |
| AUAAGGCUAGUCCGUUAUCAACUU | AGUCCGUUAUCAmAmCmUmUmGmAmAmAmAmAmGmU |
| GAAAAAGUGGCACCGAGUCGGUGC | mGmGmCmAmCmCmGmAmGmUmCmGmGmUmGmCmU*m |
| UUUU (SEQ ID NO: 85) | U*mU*mU (SEQ ID NO: 117) |
| UUACUAAAACUUUAUUUUACGUUU | mU*mU*mA*CUAAAACUUUAUUUUACGUUUUAGAmGmC |
| UAGAGCUAGAAAUAGCAAGUUAAA | mUmAmGmAmAmAmUmAmGmCAAGUUAAAAUAAGGCU |
| AUAAGGCUAGUCCGUUAUCAACUU | AGUCCGUUAUCAmAmCmUmUmGmAmAmAmAmAmGmU |
| GAAAAAGUGGCACCGAGUCGGUGC | mGmGmCmAmCmCmGmAmGmUmCmGmGmUmGmCmU*m |
| UUUU (SEQ ID NO: 86) | U*mU*mU (SEQ ID NO: 118) |
| ACCUUUUUUUUUUUUUACCUGUUU | mA*mC*mC*UUUUUUUUUUUUUACCUGUUUUAGAmGmC |
| UAGAGCUAGAAAUAGCAAGUUAAA | mUmAmGmAmAmAmUmAmGmCAAGUUAAAAUAAGGCU |
| AUAAGGCUAGUCCGUUAUCAACUU | AGUCCGUUAUCAmAmCmUmUmGmAmAmAmAmAmGmU |
| GAAAAAGUGGCACCGAGUCGGUGC | mGmGmCmAmCmCmGmAmGmUmCmGmGmUmGmCmU*m |
| UUUU (SEQ ID NO: 87) | U*mU*mU (SEQ ID NO: 119) |
| AGUGCAAUGGAUAGGUCUUUGUUU | mA*mG*mU*GCAAUGGAUAGGUCUUUGUUUUAGAmGmC |
| UAGAGCUAGAAAUAGCAAGUUAAA | mUmAmGmAmAmAmUmAmGmCAAGUUAAAAUAAGGCU |
| AUAAGGCUAGUCCGUUAUCAACUU | AGUCCGUUAUCAmAmCmUmUmGmAmAmAmAmAmGmU |
| GAAAAAGUGGCACCGAGUCGGUGC | mGmGmCmAmCmCmGmAmGmUmCmGmGmUmGmCmU*m |
| UUUU (SEQ ID NO: 88) | U*mU*mU (SEQ ID NO: 120) |
| UGAUUCCUACAGAAAAACUCGUUU | mU*mG*mA*UUCCUACAGAAAAACUCGUUUUAGAmGmC |
| UAGAGCUAGAAAUAGCAAGUUAAA | mUmAmGmAmAmAmUmAmGmCAAGUUAAAAUAAGGCU |
| AUAAGGCUAGUCCGUUAUCAACUU | AGUCCGUUAUCAmAmCmUmUmGmAmAmAmAmAmGmU |
| GAAAAAGUGGCACCGAGUCGGUGC | mGmGmCmAmCmCmGmAmGmUmCmGmGmUmGmCmU*m |
| UUUU (SEQ ID NO: 89) | U*mU*mU (SEQ ID NO: 121) |
| UGGGCAAGGGAAGAAAAAAAGUUU | mU*mG*mG*GCAAGGGAAGAAAAAAAGUUUUAGAmGmC |
| UAGAGCUAGAAAUAGCAAGUUAAA | mUmAmGmAmAmAmUmAmGmCAAGUUAAAAUAAGGCU |
| AUAAGGCUAGUCCGUUAUCAACUU | AGUCCGUUAUCAmAmCmUmUmGmAmAmAmAmAmGmU |
| GAAAAAGUGGCACCGAGUCGGUGC | mGmGmCmAmCmCmGmAmGmUmCmGmGmUmGmCmU*m |
| UUUU (SEQ ID NO: 90) | U*mU*mU (SEQ ID NO: 122) |
| CCUCACUCUUGUCUGGGCAAGUUU | mC*mC*mU*CACUCUUGUCUGGGCAAGUUUUAGAmGmC |
| UAGAGCUAGAAAUAGCAAGUUAAA | mUmAmGmAmAmAmUmAmGmCAAGUUAAAAUAAGGCU |
| AUAAGGCUAGUCCGUUAUCAACUU | AGUCCGUUAUCAmAmCmUmUmGmAmAmAmAmAmGmU |
| GAAAAAGUGGCACCGAGUCGGUGC | mGmGmCmAmCmCmGmAmGmUmCmGmGmUmGmCmU*m |
| UUUU (SEQ ID NO: 91) | U*mU*mU (SEQ ID NO: 123) |
| ACCUCACUCUUGUCUGGGCAGUUU | mA*mC*mC*UCACUCUUGUCUGGGCAGUUUUAGAmGmC |
| UAGAGCUAGAAAUAGCAAGUUAAA | mUmAmGmAmAmAmUmAmGmCAAGUUAAAAUAAGGCU |
| AUAAGGCUAGUCCGUUAUCAACUU | AGUCCGUUAUCAmAmCmUmUmGmAmAmAmAmAmGmU |
| GAAAAAGUGGCACCGAGUCGGUGC | mGmGmCmAmCmCmGmAmGmUmCmGmGmUmGmCmU*m |
| UUUU (SEQ ID NO: 92) | U*mU*mU (SEQ ID NO: 124) |
| UGAGCAACCUCACUCUUGUCGUUU | mU*mG*mA*GCAACCUCACUCUUGUCGUUUUAGAmGmC |
| UAGAGCUAGAAAUAGCAAGUUAAA | mUmAmGmAmAmAmUmAmGmCAAGUUAAAAUAAGGCU |
| AUAAGGCUAGUCCGUUAUCAACUU | AGUCCGUUAUCAmAmCmUmUmGmAmAmAmAmAmGmU |
| GAAAAAGUGGCACCGAGUCGGUGC | mGmGmCmAmCmCmGmAmGmUmCmGmGmUmGmCmU*m |
| UUUU (SEQ ID NO: 93) | U*mU*mU (SEQ ID NO: 125) |

TABLE 7
Mouse Alb Intron 1 Guide Sequences.

| Guide Sequence | SEQ ID NO: |
|---|---|
| CACUCUUGUCUGUGGAAACA | 164 |

TABLE 8
Mouse Alb Intron 1 sgRNA Sequences.

| Full Sequence | Full Sequence Modified |
|---|---|
| CACUCUUGUCUGU | mC*mA*mC*UCUUGUCUGUGGAAACAG |
| GGAAACAGUUUUA | UUUUAGAmGmCmUmAmGmAmAmAmUmA |
| GAGCUAGAAAUAG | mGmCAAGUUAAAAUAAGGCUAGUCCGU |
| CAAGUUAAAAUAA | UAUCAmAmCmUmUmGmAmAmAmAmAmG |
| GGCUAGUCCGUUA | mUmGmGmCmAmCmCmGmAmGmUmCmGm |
| UCAACUUGAAAAA | GmUmGmCmU*mU*mU*mU |
| GUGGCACCGAGUC | (SEQ ID NO: 167) |
| GGUGCUUUU | |
| (SEQ ID | |
| NO: 166) | |

[0493] TracrRNAs can be in any form (e.g., full-length tracrRNAs or active partial tracrRNAs) and of varying lengths. They can include primary transcripts or processed forms. For example, tracrRNAs (as part of a single-guide RNA or as a separate molecule as part of a two-molecule gRNA) may comprise, consist essentially of, or consist of all or a portion of a wild type tracrRNA sequence (e.g., about or more than about 20, 26, 32, 45, 48, 54, 63, 67, 85, or more nucleotides of a wild type tracrRNA sequence). Examples of wild type tracrRNA sequences from S. pyogenes include 171-nucleotide, 89-nucleotide, 75-nucleotide, and 65-nucleotide versions. See, e.g., Deltcheva et al. (2011) Nature 471(7340):602-607; WO 2014/093661, each of which is herein incorporated by reference in its entirety for all purposes. Examples of tracrRNAs within single-guide RNAs (sgRNAs) include the tracrRNA segments found within +48, +54, +67, and +85 versions of sgRNAs, where “+n” indicates that up to the +n nucleotide of wild type tracrRNA is included in the sgRNA. See U.S. Pat. No. 8,697,359, herein incorporated by reference in its entirety for all purposes.

[0494] The percent complementarity between the DNA-targeting segment of the guide RNA and the complementary strand of the target DNA can be at least 60% (e.g., at least 65%, at least 70%, at least 75%, at least 80%, at least 85%, at least 90%, at least 95%, or 100%). The percent complementarity between the DNA-targeting segment and the complementary strand of the target DNA can be at least 60% over about 20 contiguous nucleotides. As an example, the percent complementarity between the DNA-targeting segment and the complementary strand of the target DNA can be 100% over the 14 contiguous nucleotides at the 5′ end of the complementary strand of the target DNA and as low as 0% over the remainder. In such a case, the DNA-targeting segment can be considered to be 14 nucleotides in length. As another example, the percent complementarity between the DNA-targeting segment and the complementary strand of the target DNA can be 100% over the seven contiguous nucleotides at the 5′ end of the complementary strand of the target DNA and as low as 0% over the remainder. In such a case, the DNA-targeting segment can be considered to be 7 nucleotides in length. In some guide RNAs, at least 17 nucleotides within the DNA-targeting segment are complementary to the complementary strand of the target DNA. For example, the DNA-targeting segment can be 20 nucleotides in length and can comprise 1, 2, or 3 mismatches with the complementary strand of the target DNA. In one example, the mismatches are not adjacent to the region of the complementary strand corresponding to the protospacer adjacent motif (PAM) sequence (i.e., the reverse complement of the PAM sequence) (e.g., the mismatches are in the 5′ end of the DNA-targeting segment of the guide RNA, or the mismatches are at least 2, 3, 4, 5, 6, 7, 8, 9, 10, 11, 12, 13, 14, 15, 16, 17, 18, or 19 base pairs away from the region of the complementary strand corresponding to the PAM sequence).

[0495] The protein-binding segment of a gRNA can comprise two stretches of nucleotides that are complementary to one another. The complementary nucleotides of the protein-binding segment hybridize to form a double-stranded RNA duplex (dsRNA). The protein-binding segment of a subject gRNA interacts with a Cas protein, and the gRNA directs the bound Cas protein to a specific nucleotide sequence within target DNA via the DNA-targeting segment.

[0496] Single-guide RNAs can comprise a DNA-targeting segment and a scaffold sequence (i.e., the protein-binding or Cas-binding sequence of the guide RNA). For example, such guide RNAs can have a 5′ DNA-targeting segment joined to a 3′ scaffold sequence. Exemplary scaffold sequences (e.g., for use with S. pyogenes Cas9) comprise, consist essentially of, or consist of:
[0497] GUUUUAGAGCUAGAAAUAGCAAGUUAAAAUAAGGCUAGUCCGUUAUCAACUUGA AAAAGUGGCACCGAGUCGGUGCU (version 1; SEQ ID NO: 21);
[0498] GUUGGAACCAUUCAAAACAGCAUAGCAAGUUAAAAUAAGGCUAGUCCGUUAUCA ACUUGAAAAAGUGGCACCGAGUCGGUGC (version 2; SEQ ID NO: 22);
[0499] GUUUUAGAGCUAGAAAUAGCAAGUUAAAAUAAGGCUAGUCCGUUAUCAACUUGA AAAAGUGGCACCGAGUCGGUGC (version 3; SEQ ID NO: 23); and
[0500] GUUUAAGAGCUAUGCUGGAAACAGCAUAGCAAGUUUAAAUAAGGCUAGUCCGUU AUCAACUUGAAAAAGUGGCACCGAGUCGGUGC (version 4; SEQ ID NO: 24);
[0501] GUUUUAGAGCUAGAAAUAGCAAGUUAAAAUAAGGCUAGUCCGUUAUCAACUUGA AAAAGUGGCACCGAGUCGGUGCUUUUUUU (version 5; SEQ ID NO: 25);
[0502] GUUUUAGAGCUAGAAAUAGCAAGUUAAAAUAAGGCUAGUCCGUUAUCAACUUGA AAAAGUGGCACCGAGUCGGUGCUUUU (version 6; SEQ ID NO: 26);
[0503] GUUUAAGAGCUAUGCUGGAAACAGCAUAGCAAGUUUAAAUAAGGCUAGUCCGUU AUCAACUUGAAAAAGUGGCACCGAGUCGGUGCUUUUUU (version 7; SEQ ID NO: 27); or
[0504] GUUUUAGAGCUAGAAAUAGCAAGUUAAAAUAAGGCUAGUCCGUUAUCAACUUGG CACCGAGUCGGUGC (version 8; SEQ ID NO: 28). In some guide sgRNAs, the four terminal U residues of version 6 are not present. In some sgRNAs, only 1, 2, or 3 of the four terminal U residues of version 6 are present. Guide RNAs targeting any of the guide RNA target sequences disclosed herein can include, for example, a DNA-targeting segment on the 5′ end of the guide RNA fused to any of the exemplary guide RNA scaffold sequences on the 3′ end of the guide RNA. That is, any of the DNA-targeting segments disclosed herein can be joined to the 5′ end of any one of the above scaffold sequences to form a single guide RNA (chimeric guide RNA).

[0505] Guide RNAs can include modifications or sequences that provide for additional desirable features (e.g., modified or regulated stability; subcellular targeting; tracking with a fluorescent label; a binding site for a protein or protein complex; and the like). That is, guide RNAs can include one or more modified nucleosides or nucleotides, or one or more non-naturally and/or naturally occurring components or configurations that are used instead of or in addition to the canonical A, G, C, and U residues. Examples of such modifications include, for example, a 5′ cap (e.g., a 7-methylguanylate cap (m7G)); a 3′ polyadenylated tail (i.e., a 3′ poly(A) tail); a riboswitch sequence (e.g., to allow for regulated stability and/or regulated accessibility by proteins and/or protein complexes); a stability control sequence; a sequence that forms a dsRNA duplex (i.e., a hairpin); a modification or sequence that targets the RNA to a subcellular location (e.g., nucleus, mitochondria, chloroplasts, and the like); a modification or sequence that provides for tracking (e.g., direct conjugation to a fluorescent molecule, conjugation to a moiety that facilitates fluorescent detection, a sequence that allows for fluorescent detection, and so forth); a modification or sequence that provides a binding site for proteins (e.g., proteins that act on DNA, including transcriptional activators, transcriptional repressors, DNA methyltransferases, DNA demethylases, histone acetyltransferases, histone deacetylases, and the like); and combinations thereof. Other examples of modifications include engineered stem loop duplex structures, engineered bulge regions, engineered hairpins 3′ of the stem loop duplex structure, or any combination thereof. See, e.g., US 2015/0376586, herein incorporated by reference in its entirety for all purposes. A bulge can be an unpaired region of nucleotides within the duplex made up of the crRNA-like region and the minimum tracrRNA-like region. A bulge can comprise, on one side of the duplex, an unpaired 5′-XXXY-3′ where X is any purine and Y can be a nucleotide that can form a wobble pair with a nucleotide on the opposite strand, and an unpaired nucleotide region on the other side of the duplex.

[0506] Guide RNAs can comprise modified nucleosides and modified nucleotides including, for example, one or more of the following: (1) alteration or replacement of one or both of the non-linking phosphate oxygens and/or of one or more of the linking phosphate oxygens in the phosphodiester backbone linkage (an exemplary backbone modification); (2) alteration or replacement of a constituent of the ribose sugar such as alteration or replacement of the 2′ hydroxyl on the ribose sugar (an exemplary sugar modification); (3) replacement (e.g., wholesale replacement) of the phosphate moiety with dephospho linkers (an exemplary backbone modification); (4) modification or replacement of a naturally occurring nucleobase, including with a non-canonical nucleobase (an exemplary base modification); (5) replacement or modification of the ribose-phosphate backbone (an exemplary backbone modification); (6) modification of the 3′ end or 5′ end of the oligonucleotide (e.g., removal, modification or replacement of a terminal phosphate group or conjugation of a moiety, cap, or linker (such 3′ or 5′ cap modifications may comprise a sugar and/or backbone modification); and (7) modification or replacement of the sugar (an exemplary sugar modification). Other possible guide RNA modifications include modifications of or replacement of uracils or poly-uracil tracts. See, e.g., WO 2015/048577 and US 2016/0237455, each of which is herein incorporated by reference in its entirety for all purposes. Similar modifications can be made to Cas-encoding nucleic acids, such as Cas mRNAs. For example, Cas mRNAs can be modified by depletion of uridine using synonymous codons.

[0507] Chemical modifications such at hose listed above can be combined to provide modified gRNAs and/or mRNAs comprising residues (nucleosides and nucleotides) that can have two, three, four, or more modifications. For example, a modified residue can have a modified sugar and a modified nucleobase. In one example, every base of a gRNA is modified (e.g., all bases have a modified phosphate group, such as a phosphorothioate group). For example, all or substantially all of the phosphate groups of a gRNA can be replaced with phosphorothioate groups. Alternatively, or additionally, a modified gRNA can comprise at least one modified residue at or near the 5′ end. Alternatively, or additionally, a modified gRNA can comprise at least one modified residue at or near the 3′ end.

[0508] Some gRNAs comprise one, two, three or more modified residues. For example, at least 5%, at least 10%, at least 15%, at least 20%, at least 25%, at least 30%, at least 35%, at least 40%, at least 45%, at least 50%, at least 55%, at least 60%, at least 65%, at least 70%, at least 75%, at least 80%, at least 85%, at least 90%, at least 95%, or 100% of the positions in a modified gRNA can be modified nucleosides or nucleotides.

[0509] Unmodified nucleic acids can be prone to degradation. Exogenous nucleic acids can also induce an innate immune response. Modifications can help introduce stability and reduce immunogenicity. Some gRNAs described herein can contain one or more modified nucleosides or nucleotides to introduce stability toward intracellular or serum-based nucleases. Some modified gRNAs described herein can exhibit a reduced innate immune response when introduced into a population of cells.

[0510] The gRNAs disclosed herein can comprise a backbone modification in which the phosphate group of a modified residue can be modified by replacing one or more of the oxygens with a different substituent. The modification can include the wholesale replacement of an unmodified phosphate moiety with a modified phosphate group as described herein. Backbone modifications of the phosphate backbone can also include alterations that result in either an uncharged linker or a charged linker with unsymmetrical charge distribution.

[0511] Examples of modified phosphate groups include, phosphorothioate, phosphoroselenates, borano phosphates, borano phosphate esters, hydrogen phosphonates, phosphoroamidates, alkyl or aryl phosphonates and phosphotriesters. The phosphorous atom in an unmodified phosphate group is achiral. However, replacement of one of the non-bridging oxygens with one of the above atoms or groups of atoms can render the phosphorous atom chiral. The stereogenic phosphorous atom can possess either the “R” configuration (Rp) or the “S” configuration (Sp). The backbone can also be modified by replacement of a bridging oxygen, (i.e., the oxygen that links the phosphate to the nucleoside), with nitrogen (bridged phosphoroamidates), sulfur (bridged phosphorothioates) and carbon (bridged methylenephosphonates). The replacement can occur at either linking oxygen or at both of the linking oxygens.

[0512] The phosphate group can be replaced by non-phosphorus containing connectors in certain backbone modifications. In some embodiments, the charged phosphate group can be replaced by a neutral moiety. Examples of moieties which can replace the phosphate group can include, without limitation, e.g., methyl phosphonate, hydroxylamino, siloxane, carbonate, carboxymethyl, carbamate, amide, thioether, ethylene oxide linker, sulfonate, sulfonamide, thioformacetal, formacetal, oxime, methyleneimino, methylenemethylimino, methylenehydrazo, methylenedimethylhydrazo and methyleneoxymethylimino.

[0513] Scaffolds that can mimic nucleic acids can also be constructed wherein the phosphate linker and ribose sugar are replaced by nuclease resistant nucleoside or nucleotide surrogates. Such modifications may comprise backbone and sugar modifications. In some embodiments, the nucleobases can be tethered by a surrogate backbone. Examples can include, without limitation, the morpholino, cyclobutyl, pyrrolidine and peptide nucleic acid (PNA) nucleoside surrogates.

[0514] The modified nucleosides and modified nucleotides can include one or more modifications to the sugar group (a sugar modification). For example, the 2′ hydroxyl group (OH) can be modified (e.g., replaced with a number of different oxy or deoxy substituents. Modifications to the 2′ hydroxyl group can enhance the stability of the nucleic acid since the hydroxyl can no longer be deprotonated to form a 2′-alkoxide ion.

[0515] Examples of 2′ hydroxyl group modifications can include alkoxy or aryloxy (OR, wherein “R” can be, e.g., alkyl, cycloalkyl, aryl, aralkyl, heteroaryl or a sugar); polyethyleneglycols (PEG), O(CH₂CH₂O)ₙCH₂CH₂OR wherein R can be, e.g., H or optionally substituted alkyl, and n can be an integer from 0 to 20 (e.g., from 0 to 4, from 0 to 8, from 0 to 10, from 0 to 16, from 1 to 4, from 1 to 8, from 1 to 10, from 1 to 16, from 1 to 20, from 2 to 4, from 2 to 8, from 2 to 10, from 2 to 16, from 2 to 20, from 4 to 8, from 4 to 10, from 4 to 16, and from 4 to 20). The 2′ hydroxyl group modification can be 2′—O-Me. Likewise, the 2′ hydroxyl group modification can be a 2′-fluoro modification, which replaces the 2′ hydroxyl group with a fluoride. The 2′ hydroxyl group modification can include locked nucleic acids (LNA) in which the 2′ hydroxyl can be connected, e.g., by a C₁₋₆ alkylene or C₁₋₆ heteroalkylene bridge, to the 4′ carbon of the same ribose sugar, where exemplary bridges can include methylene, propylene, ether, or amino bridges; O-amino (wherein amino can be, e.g., NH₂; alkylamino, dialkylamino, heterocyclyl, arylamino, diarylamino, heteroarylamino, or diheteroarylamino, ethylenediamine, or polyamino) and aminoalkoxy, O(CH₂)ₙ-amino, (wherein amino can be, e.g., NH₂; alkylamino, dialkylamino, heterocyclyl, arylamino, diarylamino, heteroarylamino, or diheteroarylamino, ethylenediamine, or polyamino). The 2′ hydroxyl group modification can include unlocked nucleic acids (UNA) in which the ribose ring lacks the C2′-C3′ bond. The 2′ hydroxyl group modification can include the methoxyethyl group (MOE), (OCH₂CH₂OCH₃, e.g., a PEG derivative).

[0516] Deoxy 2′ modifications can include hydrogen (i.e. deoxyribose sugars, e.g., at the overhang portions of partially dsRNA); halo (e.g., bromo, chloro, fluoro, or iodo); amino (wherein amino can be, e.g., NH2; alkylamino, dialkylamino, heterocyclyl, arylamino, diarylamino, heteroarylamino, diheteroarylamino, or amino acid); NH(CH₂CH₂NH)ₙCH₂CH₂-amino (wherein amino can be, e.g., as described herein), —NHC(O)R (wherein R can be, e.g., alkyl, cycloalkyl, aryl, aralkyl, heteroaryl or sugar), cyano; mercapto; alkyl-thio-alkyl; thioalkoxy; and alkyl, cycloalkyl, aryl, alkenyl and alkynyl, which may be optionally substituted with e.g., an amino as described herein.

[0517] The sugar modification can comprise a sugar group which may also contain one or more carbons that possess the opposite stereochemical configuration than that of the corresponding carbon in ribose. Thus, a modified nucleic acid can include nucleotides containing e.g., arabinose, as the sugar. The modified nucleic acids can also include abasic sugars. These abasic sugars can also be further modified at one or more of the constituent sugar atoms. The modified nucleic acids can also include one or more sugars that are in the L form (e.g., L-nucleosides).

[0518] The modified nucleosides and modified nucleotides described herein, which can be incorporated into a modified nucleic acid, can include a modified base, also called a nucleobase. Examples of nucleobases include, but are not limited to, adenine (A), guanine (G), cytosine (C), and uracil (U). These nucleobases can be modified or wholly replaced to provide modified residues that can be incorporated into modified nucleic acids. The nucleobase of the nucleotide can be independently selected from a purine, a pyrimidine, a purine analog, or pyrimidine analog. In some embodiments, the nucleobase can include, for example, naturally-occurring and synthetic derivatives of a base.

[0519] In a dual guide RNA, each of the crRNA and the tracrRNA can contain modifications. Such modifications may be at one or both ends of the crRNA and/or tracrRNA. In a sgRNA, one or more residues at one or both ends of the sgRNA may be chemically modified, and/or internal nucleosides may be modified, and/or the entire sgRNA may be chemically modified. Some gRNAs comprise a 5′ end modification. Some gRNAs comprise a 3′ end modification.

[0520] The guide RNAs disclosed herein can comprise one of the modification patterns disclosed in WO 2018/107028 A1, herein incorporated by reference in its entirety for all purposes. The guide RNAs disclosed herein can also comprise one of the structures/modification patterns disclosed in US 2017/0114334, herein incorporated by reference in its entirety for all purposes. The guide RNAs disclosed herein can also comprise one of the structures/modification patterns disclosed in WO 2017/136794, WO 2017/004279, US 2018/0187186, or US 2019/0048338, each of which is herein incorporated by reference in its entirety for all purposes.

[0521] As one example, nucleotides at the 5′ or 3′ end of a guide RNA can include phosphorothioate linkages (e.g., the bases can have a modified phosphate group that is a phosphorothioate group). For example, a guide RNA can include phosphorothioate linkages between the 2, 3, or 4 terminal nucleotides at the 5′ or 3′ end of the guide RNA. As another example, nucleotides at the 5′ and/or 3′ end of a guide RNA can have 2′—O-methyl modifications. For example, a guide RNA can include 2′—O-methyl modifications at the 2, 3, or 4 terminal nucleotides at the 5′ and/or 3′ end of the guide RNA (e.g., the 5′ end). See, e.g., WO 2017/173054 A1 and Finn et al. (2018) Cell Rep. 22(9):2227-2235, each of which is herein incorporated by reference in its entirety for all purposes. Other possible modifications are described in more detail elsewhere herein. In a specific example, a guide RNA includes 2′—O-methyl analogs and 3′ phosphorothioate internucleotide linkages at the first three 5′ and 3′ terminal RNA residues. Such chemical modifications can, for example, provide greater stability and protection from exonucleases to guide RNAs, allowing them to persist within cells for longer than unmodified guide RNAs. Such chemical modifications can also, for example, protect against innate intracellular immune responses that can actively degrade RNA or trigger immune cascades that lead to cell death.

[0522] As one example, any of the guide RNAs described herein can comprise at least one modification. In one example, the at least one modification comprises a 2′—O-methyl (2′—O-Me) modified nucleotide, a phosphorothioate (PS) bond between nucleotides, a 2′-fluoro (2′-F) modified nucleotide, or a combination thereof. For example, the at least one modification can comprise a 2′—O-methyl (2′—O-Me) modified nucleotide. Alternatively, or additionally, the at least one modification can comprise a phosphorothioate (PS) bond between nucleotides. Alternatively, or additionally, the at least one modification can comprise a 2′-fluoro (2′-F) modified nucleotide. In one example, a guide RNA described herein comprises one or more 2′-O-methyl (2′—O-Me) modified nucleotides and one or more phosphorothioate (PS) bonds between nucleotides.

[0523] The modifications can occur anywhere in the guide RNA. As one example, the guide RNA comprises a modification at one or more of the first five nucleotides at the 5′ end of the guide RNA, the guide RNA comprises a modification at one or more of the last five nucleotides of the 3′ end of the guide RNA, or a combination thereof. For example, the guide RNA can comprise phosphorothioate bonds between the first four nucleotides of the guide RNA, phosphorothioate bonds between the last four nucleotides of the guide RNA, or a combination thereof. Alternatively, or additionally, the guide RNA can comprise 2′—O-Me modified nucleotides at the first three nucleotides at the 5′ end of the guide RNA, can comprise 2′—O-Me modified nucleotides at the last three nucleotides at the 3′ end of the guide RNA, or a combination thereof.

[0524] In one example, a modified gRNA can comprise the following sequence: mN*mN*mN*NNNNNNNNNNNNNNNNNGUUUUAGAmGmCmUmAmGmAmAmAmUmA mGmCAAGUUAAAAUAAGGCUAGUCCGUUAUCAmAmCmUmUmGmAmAmAmAmAm GmUmGmGmCmAmCmCmGmAmGmUmCmGmGmUmGmCmU*mU*mU*mU (SEQ ID NO: 29), where “N” may be any natural or non-natural nucleotide. For example, the totality of N residues comprise a human ALB intron 1 DNA-targeting segment as described herein (e.g., the sequence set forth in SEQ ID NO: 29, wherein the N residues are replaced with the DNA-targeting segment of any one of SEQ ID NOS: 30-61, the DNA-targeting segment of any one of SEQ ID NOS: 36, 30, 33, and 41, or the DNA-targeting segment of SEQ ID NO: 36. For example, a modified gRNA can comprise the sequence set forth in any one of SEQ ID NOS: 94-125, the sequence set forth in any one of SEQ ID NOS: 100, 94, 97, and 105, or the sequence set forth in SEQ ID NO: 100 in Table 6. The terms “mA,” “mC,” “mU,” and “mG” denote a nucleotide (A, C, U, and G, respectively) that has been modified with 2′—O-Me. The symbol “*” depicts a phosphorothioate modification. In certain embodiments, A, C, G, U, and N independently denote a ribose sugar, i.e., 2′—OH. In certain embodiments in the context of a modified sequence, A, C, G, U, and N denote a ribose sugar, i.e., 2′—OH. A phosphorothioate linkage or bond refers to a bond where a sulfur is substituted for one nonbridging phosphate oxygen in a phosphodiester linkage, for example in the bonds between nucleotides bases. When phosphorothioates are used to generate oligonucleotides, the modified oligonucleotides may also be referred to as S-oligos. The terms A*, C*, U*, or G* denote a nucleotide that is linked to the next (e.g., 3′) nucleotide with a phosphorothioate bond. The terms “mA*,” “mC*,” “mU*,” and “mG*” denote a nucleotide (A, C, U, and G, respectively) that has been substituted with 2′—O-Me and that is linked to the next (e.g., 3′) nucleotide with a phosphorothioate bond.

[0525] Another chemical modification that has been shown to influence nucleotide sugar rings is halogen substitution. For example, 2′-fluoro (2′-F) substitution on nucleotide sugar rings can increase oligonucleotide binding affinity and nuclease stability. Abasic nucleotides refer to those which lack nitrogenous bases. Inverted bases refer to those with linkages that are inverted from the normal 5′ to 3′ linkage (i.e., either a 5′ to 5′ linkage or a 3′ to 3′ linkage).

[0526] An abasic nucleotide can be attached with an inverted linkage. For example, an abasic nucleotide may be attached to the terminal 5′ nucleotide via a 5′ to 5′ linkage, or an abasic nucleotide may be attached to the terminal 3′ nucleotide via a 3′ to 3′ linkage. An inverted abasic nucleotide at either the terminal 5′ or 3′ nucleotide may also be called an inverted abasic end cap.

[0527] In one example, one or more of the first three, four, or five nucleotides at the 5′ terminus, and one or more of the last three, four, or five nucleotides at the 3′ terminus are modified. The modification can be, for example, a 2′—O-Me, 2′-F, inverted abasic nucleotide, phosphorothioate bond, or other nucleotide modification well known to increase stability and/or performance.

[0528] In another example, the first four nucleotides at the 5′ terminus, and the last four nucleotides at the 3′ terminus can be linked with phosphorothioate bonds.

[0529] In another example, the first three nucleotides at the 5′ terminus, and the last three nucleotides at the 3′ terminus can comprise a 2′—O-methyl (2′—O-Me) modified nucleotide. In another example, the first three nucleotides at the 5′ terminus, and the last three nucleotides at the 3′ terminus comprise a 2′-fluoro (2′-F) modified nucleotide. In another example, the first three nucleotides at the 5′ terminus, and the last three nucleotides at the 3′ terminus comprise an inverted abasic nucleotide.

[0530] Guide RNAs can be provided in any form. For example, the gRNA can be provided in the form of RNA, either as two molecules (separate crRNA and tracrRNA) or as one molecule (sgRNA), and optionally in the form of a complex with a Cas protein. The gRNA can also be provided in the form of DNA encoding the gRNA. The DNA encoding the gRNA can encode a single RNA molecule (sgRNA) or separate RNA molecules (e.g., separate crRNA and tracrRNA). In the latter case, the DNA encoding the gRNA can be provided as one DNA molecule or as separate DNA molecules encoding the crRNA and tracrRNA, respectively.

[0531] When a gRNA is provided in the form of DNA, the gRNA can be transiently, conditionally, or constitutively expressed in the cell. DNAs encoding gRNAs can be stably integrated into the genome of the cell and operably linked to a promoter active in the cell. Alternatively, DNAs encoding gRNAs can be operably linked to a promoter in an expression construct. For example, the DNA encoding the gRNA can be in a vector comprising a heterologous nucleic acid, such as a nucleic acid encoding a Cas protein. Alternatively, it can be in a vector or a plasmid that is separate from the vector comprising the nucleic acid encoding the Cas protein. Promoters that can be used in such expression constructs include promoters active, for example, in one or more of a eukaryotic cell, a human cell, a non-human cell, a mammalian cell, a non-human mammalian cell, a rodent cell, a mouse cell, a rat cell, a pluripotent cell, an embryonic stem (ES) cell, an adult stem cell, a developmentally restricted progenitor cell, an induced pluripotent stem (iPS) cell, or a one-cell stage embryo. Such promoters can be, for example, conditional promoters, inducible promoters, constitutive promoters, or tissue-specific promoters. Such promoters can also be, for example, bidirectional promoters. Specific examples of suitable promoters include an RNA polymerase III promoter, such as a human U6 promoter, a rat U6 polymerase III promoter, or a mouse U6 polymerase III promoter.

[0532] Alternatively, gRNAs can be prepared by various other methods. For example, gRNAs can be prepared by in vitro transcription using, for example, T7 RNA polymerase (see, e.g., WO 2014/089290 and WO 2014/065596, each of which is herein incorporated by reference in its entirety for all purposes). Guide RNAs can also be a synthetically produced molecule prepared by chemical synthesis. For example, a guide RNA can be chemically synthesized to include 2′—O-methyl analogs and 3′ phosphorothioate internucleotide linkages at the first three 5′ and 3′ terminal RNA residues.

[0533] Guide RNAs (or nucleic acids encoding guide RNAs) can be in compositions comprising one or more guide RNAs (e.g., 1, 2, 3, 4, or more guide RNAs) and a carrier increasing the stability of the guide RNA (e.g., prolonging the period under given conditions of storage (e.g., −20° C., 4° C., or ambient temperature) for which degradation products remain below a threshold, such below 0.5% by weight of the starting nucleic acid or protein; or increasing the stability in vivo). Non-limiting examples of such carriers include poly(lactic acid) (PLA) microspheres, poly(D,L-lactic-coglycolic-acid) (PLGA) microspheres, liposomes, micelles, inverse micelles, lipid cochleates, and lipid microtubules. Such compositions can further comprise a Cas protein, such as a Cas9 protein, or a nucleic acid encoding a Cas protein.

[0534] As one example, a guide RNA targeting intron 1 of a human ALB gene can comprise, consist essentially of, or consist of the sequence set forth in any one of SEQ ID NOS: 62-125. Alternatively, a guide RNA targeting intron 1 of a human ALB gene can comprise, consist essentially of, or consist of a sequence that is at least 75%, at least 80%, at least 85%, at least 90%, or at least 95% identical to the DNA-targeting segment set forth in any one of SEQ ID NOS: 62-125. Alternatively, a guide RNA targeting intron 1 of a human ALB gene can comprise, consist essentially of, or consist of a sequence that is at least 90% or at least 95% identical to the DNA-targeting segment set forth in any one of SEQ ID NOS: 62-125. Alternatively, a guide RNA targeting intron 1 of a human ALB gene can comprise, consist essentially of, or consist of a sequence that differs by no more than 3, no more than 2, or no more than 1 nucleotide from the sequence set forth in any one of SEQ ID NOS: 62-125.

[0535] As another example, a guide RNA targeting intron 1 of a human ALB gene can comprise, consist essentially of, or consist of the sequence set forth in any one of SEQ ID NOS: 68, 100, 62, 94, 65, 97, 73, and 105. Alternatively, a guide RNA targeting intron 1 of a human ALB gene can comprise, consist essentially of, or consist of a sequence that is at least 75%, at least 80%, at least 85%, at least 90%, or at least 95% identical to the DNA-targeting segment set forth in any one of SEQ ID NOS: 68, 100, 62, 94, 65, 97, 73, and 105. Alternatively, a guide RNA targeting intron 1 of a human ALB gene can comprise, consist essentially of, or consist of a sequence that is at least 90% or at least 95% identical to the DNA-targeting segment set forth in any one of SEQ ID NOS: 68, 100, 62, 94, 65, 97, 73, and 105. Alternatively, a guide RNA targeting intron 1 of a human ALB gene can comprise, consist essentially of, or consist of a sequence that differs by no more than 3, no more than 2, or no more than 1 nucleotide from the sequence set forth in any one of SEQ ID NOS: 68, 100, 62, 94, 65, 97, 73, and 105.

[0536] As another example, a guide RNA targeting intron 1 of a human ALB gene can comprise, consist essentially of, or consist of the sequence set forth in SEQ ID NO: 68 or 100. Alternatively, a guide RNA targeting intron 1 of a human ALB gene can comprise, consist essentially of, or consist of a sequence that is at least 75%, at least 80%, at least 85%, at least 90%, or at least 95% identical to the DNA-targeting segment set forth in SEQ ID NO: 68 or 100. Alternatively, a guide RNA targeting intron 1 of a human ALB gene can comprise, consist essentially of, or consist of a sequence that is at least 90% or at least 95% identical to the DNA-targeting segment set forth in SEQ ID NO: 68 or 100. Alternatively, a guide RNA targeting intron 1 of a human ALB gene can comprise, consist essentially of, or consist of a sequence that differs by no more than 3, no more than 2, or no more than 1 nucleotide from the sequence set forth in SEQ ID NO: 68 or 100.

[0537] As another example, a guide RNA targeting intron 1 of a human ALB gene can comprise, consist essentially of, or consist of the sequence set forth in SEQ ID NO: 62 or 94. Alternatively, a guide RNA targeting intron 1 of a human ALB gene can comprise, consist essentially of, or consist of a sequence that is at least 75%, at least 80%, at least 85%, at least 90%, or at least 95% identical to the DNA-targeting segment set forth in SEQ ID NO: 62 or 94. Alternatively, a guide RNA targeting intron 1 of a human ALB gene can comprise, consist essentially of, or consist of a sequence that is at least 90% or at least 95% identical to the DNA-targeting segment set forth in SEQ ID NO: 62 or 94. Alternatively, a guide RNA targeting intron 1 of a human ALB gene can comprise, consist essentially of, or consist of a sequence that differs by no more than 3, no more than 2, or no more than 1 nucleotide from the sequence set forth in SEQ ID NO: 62 or 94.

[0538] As another example, a guide RNA targeting intron 1 of a human ALB gene can comprise, consist essentially of, or consist of the sequence set forth in SEQ ID NO: 65 or 97. Alternatively, a guide RNA targeting intron 1 of a human ALB gene can comprise, consist essentially of, or consist of a sequence that is at least 75%, at least 80%, at least 85%, at least 90%, or at least 95% identical to the DNA-targeting segment set forth in SEQ ID NO: 65 or 97. Alternatively, a guide RNA targeting intron 1 of a human ALB gene can comprise, consist essentially of, or consist of a sequence that is at least 90% or at least 95% identical to the DNA-targeting segment set forth in SEQ ID NO: 65 or 97. Alternatively, a guide RNA targeting intron 1 of a human ALB gene can comprise, consist essentially of, or consist of a sequence that differs by no more than 3, no more than 2, or no more than 1 nucleotide from the sequence set forth in SEQ ID NO: 65 or 97.

[0539] As another example, a guide RNA targeting intron 1 of a human ALB gene can comprise, consist essentially of, or consist of the sequence set forth in SEQ ID NO: 73 or 105. Alternatively, a guide RNA targeting intron 1 of a human ALB gene can comprise, consist essentially of, or consist of a sequence that is at least 75%, at least 80%, at least 85%, at least 90%, or at least 95% identical to the DNA-targeting segment set forth in SEQ ID NO: 73 or 105. Alternatively, a guide RNA targeting intron 1 of a human ALB gene can comprise, consist essentially of, or consist of a sequence that is at least 90% or at least 95% identical to the DNA-targeting segment set forth in SEQ ID NO: 73 or 105. Alternatively, a guide RNA targeting intron 1 of a human ALB gene can comprise, consist essentially of, or consist of a sequence that differs by no more than 3, no more than 2, or no more than 1 nucleotide from the sequence set forth in SEQ ID NO: 73 or 105.

### (4) Guide RNA Target Sequences

[0540] Target DNAs for guide RNAs include nucleic acid sequences present in a DNA to which a DNA-targeting segment of a gRNA will bind, provided sufficient conditions for binding exist. Suitable DNA/RNA binding conditions include physiological conditions normally present in a cell. Other suitable DNA/RNA binding conditions (e.g., conditions in a cell-free system) are known in the art (see, e.g., Molecular Cloning: A Laboratory Manual, 3rd Ed. (Sambrook et al., Harbor Laboratory Press 2001), herein incorporated by reference in its entirety for all purposes). The strand of the target DNA that is complementary to and hybridizes with the gRNA can be called the “complementary strand,” and the strand of the target DNA that is complementary to the “complementary strand” (and is therefore not complementary to the Cas protein or gRNA) can be called “noncomplementary strand” or “template strand.”

[0541] The target DNA includes both the sequence on the complementary strand to which the guide RNA hybridizes and the corresponding sequence on the non-complementary strand (e.g., adjacent to the protospacer adjacent motif (PAM)). The term “guide RNA target sequence” as used herein refers specifically to the sequence on the non-complementary strand corresponding to (i.e., the reverse complement of) the sequence to which the guide RNA hybridizes on the complementary strand. That is, the guide RNA target sequence refers to the sequence on the non-complementary strand adjacent to the PAM (e.g., upstream or 5′ of the PAM in the case of Cas9). A guide RNA target sequence is equivalent to the DNA-targeting segment of a guide RNA, but with thymines instead of uracils. As one example, a guide RNA target sequence for an SpCas9 enzyme can refer to the sequence upstream of the 5′-NGG-3′ PAM on the non-complementary strand. A guide RNA is designed to have complementarity to the complementary strand of a target DNA, where hybridization between the DNA-targeting segment of the guide RNA and the complementary strand of the target DNA promotes the formation of a CRISPR complex. Full complementarity is not necessarily required, provided that there is sufficient complementarity to cause hybridization and promote formation of a CRISPR complex. If a guide RNA is referred to herein as targeting a guide RNA target sequence, what is meant is that the guide RNA hybridizes to the complementary strand sequence of the target DNA that is the reverse complement of the guide RNA target sequence on the non-complementary strand.

[0542] A target DNA or guide RNA target sequence can comprise any polynucleotide, and can be located, for example, in the nucleus or cytoplasm of a cell or within an organelle of a cell, such as a mitochondrion or chloroplast. A target DNA or guide RNA target sequence can be any nucleic acid sequence endogenous or exogenous to a cell. The guide RNA target sequence can be a sequence coding a gene product (e.g., a protein) or a non-coding sequence (e.g., a regulatory sequence) or can include both.

[0543] Site-specific binding and cleavage of a target DNA by a Cas protein can occur at locations determined by both (i) base-pairing complementarity between the guide RNA and the complementary strand of the target DNA and (ii) a short motif, called the protospacer adjacent motif (PAM), in the non-complementary strand of the target DNA. The PAM can flank the guide RNA target sequence. Optionally, the guide RNA target sequence can be flanked on the 3′ end by the PAM (e.g., for Cas9). Alternatively, the guide RNA target sequence can be flanked on the 5′ end by the PAM (e.g., for Cpf1). For example, the cleavage site of Cas proteins can be about 1 to about 10 or about 2 to about 5 base pairs (e.g., 3 base pairs) upstream or downstream of the PAM sequence (e.g., within the guide RNA target sequence). In the case of SpCas9, the PAM sequence (i.e., on the non-complementary strand) can be 5′-N₁GG-3′, where N₁ is any DNA nucleotide, and where the PAM is immediately 3′ of the guide RNA target sequence on the non-complementary strand of the target DNA. As such, the sequence corresponding to the PAM on the complementary strand (i.e., the reverse complement) would be 5′-CCN₂-3′, where N₂ is any DNA nucleotide and is immediately 5′ of the sequence to which the DNA-targeting segment of the guide RNA hybridizes on the complementary strand of the target DNA. In some such cases, N₁ and N₂ can be complementary and the N₁-N₂ base pair can be any base pair (e.g., N₁=C and N₂=G; N₁=G and N₂=C; N₁=A and N₂=T; or N₁=T, and N₂=A). In the case of Cas9 from S. aureus, the PAM can be NNGRRT or NNGRR, where N can A, G, C, or T, and R can be G or A. In the case of Cas9 from C. jejuni, the PAM can be, for example, NNNNACAC or NNNNRYAC, where N can be A, G, C, or T, and R can be G or A. In some cases (e.g., for FnCpf1), the PAM sequence can be upstream of the 5′ end and have the sequence 5′-TTN-3′. In the case of DpbCasX, the PAM can have the sequence 5′-TTCN-3′. In the case of CasΦ, the PAM can have the sequence 5′-TBN-3′, wherein B is G, T, or C.

[0544] An example of a guide RNA target sequence is a 20-nucleotide DNA sequence immediately preceding an NGG motif recognized by an SpCas9 protein. For example, two examples of guide RNA target sequences plus PAMs are GN₁₉NGG (SEQ ID NO: 5) or N₂₀NGG (SEQ ID NO: 6). See, e.g., WO 2014/165825, herein incorporated by reference in its entirety for all purposes. The guanine at the 5′ end can facilitate transcription by RNA polymerase in cells. Other examples of guide RNA target sequences plus PAMs can include two guanine nucleotides at the 5′ end (e.g., GGN₂₀NGG; SEQ ID NO: 7) to facilitate efficient transcription by T7 polymerase in vitro. See, e.g., WO 2014/065596, herein incorporated by reference in its entirety for all purposes. Other guide RNA target sequences plus PAMs can have between 4-22 nucleotides in length of SEQ ID NOS: 5-7, including the 5′ G or GG and the 3′ GG or NGG. Yet other guide RNA target sequences plus PAMs can have between 14 and 20 nucleotides in length of SEQ ID NOS: 5-7.

[0545] Formation of a CRISPR complex hybridized to a target DNA can result in cleavage of one or both strands of the target DNA within or near the region corresponding to the guide RNA target sequence (i.e., the guide RNA target sequence on the non-complementary strand of the target DNA and the reverse complement on the complementary strand to which the guide RNA hybridizes). For example, the cleavage site can be within the guide RNA target sequence (e.g., at a defined location relative to the PAM sequence). The “cleavage site” includes the position of a target DNA at which a Cas protein produces a single-strand break or a double-strand break. The cleavage site can be on only one strand (e.g., when a nickase is used) or on both strands of a double-stranded DNA. Cleavage sites can be at the same position on both strands (producing blunt ends; e.g., Cas9)) or can be at different sites on each strand (producing staggered ends (i.e., overhangs); e.g., Cpf1). Staggered ends can be produced, for example, by using two Cas proteins, each of which produces a single-strand break at a different cleavage site on a different strand, thereby producing a double-strand break. For example, a first nickase can create a single-strand break on the first strand of double-stranded DNA (dsDNA), and a second nickase can create a single-strand break on the second strand of dsDNA such that overhanging sequences are created. In some cases, the guide RNA target sequence or cleavage site of the nickase on the first strand is separated from the guide RNA target sequence or cleavage site of the nickase on the second strand by at least 2, 3, 4, 5, 6, 7, 8, 9, 10, 15, 20, 25, 30, 40, 50, 75, 100, 250, 500, or 1,000 base pairs.

[0546] The guide RNA target sequence can also be selected to minimize off-target modification or avoid off-target effects (e.g., by avoiding two or fewer mismatches to off-target genomic sequences).

[0547] As one example, a guide RNA targeting intron 1 of a human ALB gene can target the guide RNA target sequence set forth in any one of SEQ ID NOS: 126-157. As another example, a guide RNA targeting intron 1 of a human ALB gene can target at least 17, at least 18, at least 19, or at least 20 contiguous nucleotides of the guide RNA target sequence set forth in any one of SEQ ID NOS: 126-157.

[0548] As another example, a guide RNA targeting intron 1 of a human ALB gene can target the guide RNA target sequence set forth in any one of SEQ ID NOS: 132, 126, 129, and 137. As another example, a guide RNA targeting intron 1 of a human ALB gene can target at least 17, at least 18, at least 19, or at least 20 contiguous nucleotides of the guide RNA target sequence set forth in any one of SEQ ID NOS: 132, 126, 129, and 137.

[0549] As another example, a guide RNA targeting intron 1 of a human ALB gene can target the guide RNA target sequence set forth in SEQ ID NO: 132. As another example, a guide RNA targeting intron 1 of a human ALB gene can target at least 17, at least 18, at least 19, or at least 20 contiguous nucleotides of the guide RNA target sequence set forth in SEQ ID NO: 132.

[0550] As another example, a guide RNA targeting intron 1 of a human ALB gene can target the guide RNA target sequence set forth in SEQ ID NO: 126. As another example, a guide RNA targeting intron 1 of a human ALB gene can target at least 17, at least 18, at least 19, or at least 20 contiguous nucleotides of the guide RNA target sequence set forth in SEQ ID NO: 126.

[0551] As another example, a guide RNA targeting intron 1 of a human ALB gene can target the guide RNA target sequence set forth in SEQ ID NO: 129. As another example, a guide RNA targeting intron 1 of a human ALB gene can target at least 17, at least 18, at least 19, or at least 20 contiguous nucleotides of the guide RNA target sequence set forth in SEQ ID NO: 129.

[0552] As another example, a guide RNA targeting intron 1 of a human ALB gene can target the guide RNA target sequence set forth in SEQ ID NO: 137. As another example, a guide RNA targeting intron 1 of a human ALB gene can target at least 17, at least 18, at least 19, or at least 20 contiguous nucleotides of the guide RNA target sequence set forth in SEQ ID NO: 137.

TABLE 9
Human ALB Intron 1 Guide RNA Target
Sequences.

| Guide RNA Target Sequence | SEQ ID NO: |
|---|---|
| GAGCAACCTCACTCTTGTCT | 126 |
| ATGCATTTGTTTCAAAATAT | 127 |
| TGCATTTGTTTCAAAATATT | 128 |
| ATTTATGAGATCAACAGCAC | 129 |
| GATCAACAGCACAGGTTTTG | 130 |
| TTAAATAAAGCATAGTGCAA | 131 |
| TAAAGCATAGTGCAATGGAT | 132 |
| TAGTGCAATGGATAGGTCTT | 133 |
| TACTAAAACTTTATTTTACT | 134 |
| AAAGTTGAACAATAGAAAAA | 135 |
| AATGCATAATCTAAGTCAAA | 136 |
| TAATAAAATTCAAACATCCT | 137 |
| GCATCTTTAAAGAATTATTT | 138 |
| TTTGGCATTTATTTCTAAAA | 139 |
| TGTATTTGTGAAGTCTTACA | 140 |
| TCCTAGGTAAAAAAAAAAAA | 141 |
| TAATTTTCTTTTGCGCACTA | 142 |
| TGACTGAAACTTCACAGAAT | 143 |
| GACTGAAACTTCACAGAATA | 144 |
| TTCATTTTAGTCTGTCTTCT | 145 |
| ATTATCTAAGTTTGAATATA | 146 |
| AATTTTTAAAATAGTATTCT | 147 |
| TGAATTATTCTTCTGTTTAA | 148 |
| ATCATCCTGAGTTTTTCTGT | 149 |
| TTACTAAAACTTTATTTTAC | 150 |
| ACCTTTTTTTTTTTTTACCT | 151 |
| AGTGCAATGGATAGGTCTTT | 152 |
| TGATTCCTACAGAAAAACTC | 153 |
| TGGGCAAGGGAAGAAAAAAA | 154 |
| CCTCACTCTTGTCTGGGCAA | 155 |
| ACCTCACTCTTGTCTGGGCA | 156 |
| TGAGCAACCTCACTCTTGTC | 157 |

TABLE 10
Mouse Alb Intron 1 Guide RNA Target
Sequences.

| Guide RNA Target Sequence | SEQ ID NO: |
|---|---|
| CACTCTTGTCTGTGGAAACA | 165 |

### (5) Lipid Nanoparticles Comprising Nuclease Agents

[0553] Lipid nanoparticles comprising the nuclease agents (e.g., CRISPR/Cas systems) are also provided. The lipid nanoparticles can alternatively or additionally comprise a nucleic acid construct encoding a multidomain therapeutic protein as disclosed herein. For example, the lipid nanoparticles can comprise a nuclease agent (e.g., CRISPR/Cas system), can comprise a nucleic acid construct encoding a multidomain therapeutic protein, or can comprise both a nuclease agent (e.g., a CRISPR/Cas system) and a nucleic acid construct encoding a multidomain therapeutic protein. Regarding CRISPR/Cas systems, the lipid nanoparticles can comprise the Cas protein in any form (e.g., protein, DNA, or mRNA) and/or can comprise the guide RNA(s) in any form (e.g., DNA or RNA). In one example, the lipid nanoparticles comprise the Cas protein in the form of mRNA (e.g., a modified RNA as described herein) and the guide RNA(s) in the form of RNA (e.g., a modified guide RNA as disclosed herein). As another example, the lipid nanoparticles can comprise the Cas protein in the form of protein and the guide RNA(s) in the form of RNA). In a specific example, the guide RNA and the Cas protein are each introduced in the form of RNA via LNP-mediated delivery in the same LNP. As discussed in more detail elsewhere herein, one or more of the RNAs can be modified. For example, guide RNAs can be modified to comprise one or more stabilizing end modifications at the 5′ end and/or the 3′ end. Such modifications can include, for example, one or more phosphorothioate linkages at the 5′ end and/or the 3′ end and/or one or more 2′—O-methyl modifications at the 5′ end and/or the 3′ end. As another example, Cas mRNA modifications can include substitution with pseudouridine (e.g., fully substituted with pseudouridine), 5′ caps, and polyadenylation. As another example, Cas mRNA modifications can include substitution with N1-methyl-pseudouridine (e.g., fully substituted with N1-methyl-pseudouridine), 5′ caps, and polyadenylation. Other modifications are also contemplated as disclosed elsewhere herein. Delivery through such methods can result in transient Cas expression and/or transient presence of the guide RNA, and the biodegradable lipids improve clearance, improve tolerability, and decrease immunogenicity. Lipid formulations can protect biological molecules from degradation while improving their cellular uptake. Lipid nanoparticles are particles comprising a plurality of lipid molecules physically associated with each other by intermolecular forces. These include microspheres (including unilamellar and multilamellar vesicles, e.g., liposomes), a dispersed phase in an emulsion, micelles, or an internal phase in a suspension. Such lipid nanoparticles can be used to encapsulate one or more nucleic acids or proteins for delivery. Formulations which contain cationic lipids are useful for delivering polyanions such as nucleic acids. Other lipids that can be included are neutral lipids (i.e., uncharged or zwitterionic lipids), anionic lipids, helper lipids that enhance transfection, and stealth lipids that increase the length of time for which nanoparticles can exist in vivo. Examples of suitable cationic lipids, neutral lipids, anionic lipids, helper lipids, and stealth lipids can be found in WO 2016/010840 A1 and WO 2017/173054 A1, each of which is herein incorporated by reference in its entirety for all purposes. An exemplary lipid nanoparticle can comprise a cationic lipid and one or more other components. In one example, the other component can comprise a helper lipid such as cholesterol. In another example, the other components can comprise a helper lipid such as cholesterol and a neutral lipid such as distearoylphosphatidylcholine or 1,2-distearoyl-sn-glycero-3-phosphocholine (DSPC). In another example, the other components can comprise a helper lipid such as cholesterol, an optional neutral lipid such as DSPC, and a stealth lipid such as S010, S024, S027, S031, or S033.

[0554] The LNP may contain one or more or all of the following: (i) a lipid for encapsulation and for endosomal escape; (ii) a neutral lipid for stabilization; (iii) a helper lipid for stabilization; and (iv) a stealth lipid. See, e.g., Finn et al. (2018) Cell Rep. 22(9):2227-2235 and WO 2017/173054 A1, each of which is herein incorporated by reference in its entirety for all purposes. In certain LNPs, the cargo can include a guide RNA or a nucleic acid encoding a guide RNA. In certain LNPs, the cargo can include an mRNA encoding a Cas nuclease, such as Cas9, and a guide RNA or a nucleic acid encoding a guide RNA. In certain LNPs, the cargo can include a nucleic acid construct encoding a multidomain therapeutic protein as described elsewhere herein. In certain LNPs, the cargo can include an mRNA encoding a Cas nuclease, such as Cas9, a guide RNA or a nucleic acid encoding a guide RNA, and a nucleic acid construct encoding a multidomain therapeutic protein. In some LNPs, the lipid component comprises an amine lipid such as a biodegradable, ionizable lipid. In some instances, the lipid component comprises biodegradable, ionizable lipid, cholesterol, DSPC, and PEG-DMG. For example, Cas9 mRNA and gRNA can be delivered to cells and animals utilizing lipid formulations comprising ionizable lipid ((9Z,12Z)-3-((4,4-bis(octyloxy)butanoyl)oxy)-2-((((3-(diethylamino)propoxy)carbonyl)oxy)methyl)propyl octadeca-9,12-dienoate, also called 3-((4,4-bis(octyloxy)butanoyl)oxy)-2-((((3-(diethylamino)propoxy)carbonyl)oxy)methyl)propyl (9Z, 12Z)-octadeca-9,12-dienoate), cholesterol, DSPC, and PEG2k-DMG.

[0555] In some examples, the LNPs comprise cationic lipids. In some examples, the LNPs comprise (9Z,12Z)-3-((4,4-bis(octyloxy)butanoyl)oxy)-2-((((3-(diethylamino)propoxy)carbonyl)oxy)methyl)propyl octadeca-9,12-dienoate, also called 3-((4,4-bis(octyloxy)butanoyl)oxy)-2-((((3-(diethylamino)propoxy)carbonyl)oxy)methyl)propyl (9Z,12Z)-octadeca-9,12-dienoate) or another ionizable lipid. See, e.g., WO 2019/067992, WO 2017/173054, WO 2015/095340, and WO 2014/136086, each of which is herein incorporated by reference in its entirety for all purposes. In some examples, the LNPs comprise molar ratios of a cationic lipid amine to RNA phosphate (N:P) of about 4.5, about 5.0, about 5.5, about 6.0, or about 6.5. In some examples, the terms cationic and ionizable in the context of LNP lipids are interchangeable (e.g., wherein ionizable lipids are cationic depending on the pH).

[0556] The lipid for encapsulation and endosomal escape can be a cationic lipid. The lipid can also be a biodegradable lipid, such as a biodegradable ionizable lipid. One example of a suitable lipid is Lipid A or LP01, which is (9Z,12Z)-3-((4,4-bis(octyloxy)butanoyl)oxy)-2-((((3-(diethylamino)propoxy)carbonyl)oxy)methyl)propyl octadeca-9,12-dienoate, also called 3-((4,4-bis(octyloxy)butanoyl)oxy)-2-((((3-(diethylamino)propoxy)carbonyl)oxy)methyl)propyl (9Z,12Z)-octadeca-9,12-dienoate. See, e.g., Finn et al. (2018) Cell Rep. 22(9):2227-2235 and WO 2017/173054 A1, each of which is herein incorporated by reference in its entirety for all purposes. Another example of a suitable lipid is Lipid B, which is ((5-((dimethylamino)methyl)-1,3-phenylene)bis(oxy))bis(octane-8,1-diyl)bis(decanoate), also called ((5-((dimethylamino)methyl)-1,3-phenylene)bis(oxy))bis(octane-8,1-diyl)bis(decanoate). Another example of a suitable lipid is Lipid C, which is 2-((4-(((3-(dimethylamino)propoxy)carbonyl)oxy)hexadecanoyl)oxy)propane-1,3-diyl(9Z,9′Z,12Z,12′Z)-bis(octadeca-9,12-dienoate). Another example of a suitable lipid is Lipid D, which is 3-(((3-(dimethylamino)propoxy)carbonyl)oxy)-13-(octanoyloxy)tridecyl 3-octylundecanoate. Other suitable lipids include heptatriaconta-6,9,28,31-tetraen-19-yl 4-(dimethylamino)butanoate (also known as [(6Z,9Z,28Z,31Z)-heptatriaconta-6,9,28,31-tetraen-19-yl] 4-(dimethylamino)butanoate or Dlin-MC3-DMA (MC3))).

[0557] Some such lipids suitable for use in the LNPs described herein are biodegradable in vivo.

[0558] Such lipids may be ionizable depending upon the pH of the medium they are in. For example, in a slightly acidic medium, the lipids may be protonated and thus bear a positive charge. Conversely, in a slightly basic medium, such as, for example, blood where pH is approximately 7.35, the lipids may not be protonated and thus bear no charge. In some embodiments, the lipids may be protonated at a pH of at least about 9, 9.5, or 10. The ability of such a lipid to bear a charge is related to its intrinsic pKa. For example, the lipid may, independently, have a pKa in the range of from about 5.8 to about 6.2.

[0559] Neutral lipids function to stabilize and improve processing of the LNPs. Examples of suitable neutral lipids include a variety of neutral, uncharged or zwitterionic lipids. Examples of neutral phospholipids suitable for use in the present disclosure include, but are not limited to, 5-heptadecylbenzene-1,3-diol (resorcinol), dipalmitoylphosphatidylcholine (DPPC), distearoylphosphatidylcholine or 1,2-distearoyl-sn-glycero-3-phosphocholine (DSPC), phosphocholine (DOPC), dimyristoylphosphatidylcholine (DMPC), phosphatidylcholine (PLPC), 1,2-diarachidonoyl-sn-glycero-3-phosphocholine (DAPC), phosphatidylethanolamine (PE), egg phosphatidylcholine (EPC), dilauryloylphosphatidylcholine (DLPC), dimyristoylphosphatidylcholine (DMPC), 1-myristoyl-2-palmitoyl phosphatidylcholine (MPPC), 1-palmitoyl-2-myristoyl phosphatidylcholine (PMPC), 1-palmitoyl-2-stearoyl phosphatidylcholine (PSPC), 1,2-diarachidoyl-sn-glycero-3-phosphocholine (DBPC), 1-stearoyl-2-palmitoyl phosphatidylcholine (SPPC), 1,2-dieicosenoyl-sn-glycero-3-phosphocholine (DEPC), palmitoyloleoyl phosphatidylcholine (POPC), lysophosphatidyl choline, dioleoyl phosphatidylethanolamine (DOPE), dilinoleoylphosphatidylcholine distearoylphosphatidylethanolamine (DSPE), dimyristoyl phosphatidylethanolamine (DMPE), dipalmitoyl phosphatidylethanolamine (DPPE), palmitoyloleoyl phosphatidylethanolamine (POPE), lysophosphatidylethanolamine, 1-stearoyl-2-oleoyl-sn-glycero-3-phosphocholine (SOPC), and combinations thereof. For example, the neutral phospholipid may be selected from the group consisting of distearoylphosphatidylcholine (DSPC) and dimyristoyl phosphatidyl ethanolamine (DMPE).

[0560] Helper lipids include lipids that enhance transfection. The mechanism by which the helper lipid enhances transfection can include enhancing particle stability. In certain cases, the helper lipid can enhance membrane fusogenicity. Helper lipids include steroids, sterols, and alkyl resorcinols. Examples of suitable helper lipids suitable include cholesterol, 5-heptadecylresorcinol, and cholesterol hemisuccinate. In one example, the helper lipid may be cholesterol or cholesterol hemisuccinate.

[0561] Stealth lipids include lipids that alter the length of time the nanoparticles can exist in vivo. Stealth lipids may assist in the formulation process by, for example, reducing particle aggregation and controlling particle size. Stealth lipids may modulate pharmacokinetic properties of the LNP. Suitable stealth lipids include lipids having a hydrophilic head group linked to a lipid moiety.

[0562] The hydrophilic head group of stealth lipid can comprise, for example, a polymer moiety selected from polymers based on PEG (sometimes referred to as poly(ethylene oxide)), poly(oxazoline), poly(vinyl alcohol), poly(glycerol), poly(N-vinylpyrrolidone), polyaminoacids, and poly N-(2-hydroxypropyl)methacrylamide. The term PEG means any polyethylene glycol or other polyalkylene ether polymer. In certain LNP formulations, the PEG, is a PEG-2K, also termed PEG 2000, which has an average molecular weight of about 2,000 daltons. See, e.g., WO 2017/173054 A1, herein incorporated by reference in its entirety for all purposes.

[0563] The lipid moiety of the stealth lipid may be derived, for example, from diacylglycerol or diacylglycamide, including those comprising a dialkylglycerol or dialkylglycamide group having alkyl chain length independently comprising from about C4 to about C40 saturated or unsaturated carbon atoms, wherein the chain may comprise one or more functional groups such as, for example, an amide or ester. The dialkylglycerol or dialkylglycamide group can further comprise one or more substituted alkyl groups.

[0564] As one example, the stealth lipid may be selected from PEG-dilauroylglycerol, PEG-dimyristoylglycerol (PEG-DMG), PEG-dipalmitoylglycerol, PEG-distearoylglycerol (PEG-DSPE), PEG-dilaurylglycamide, PEG-dimyristylglycamide, PEG-dipalmitoylglycamide, and PEG-distearoylglycamide, PEG-cholesterol (1-[8′-(Cholest-5-en-3[beta]-oxy)carboxamido-3′, 6′-dioxaoctanyl]carbamoyl-[omega]-methyl-poly(ethylene glycol), PEG-DMB (3,4-ditetradecoxylbenzyl-[omega]-methyl-poly(ethylene glycol)ether), 1,2-dimyristoyl-sn-glycero-3-phosphoethanolamine-N-[methoxy(polyethylene glycol)-2000] (PEG2k-DMPE), or 1,2-dimyristoyl-rac-glycero-3-methylpolyoxyethylene glycol-2000 (PEG2k-DMG), 1,2-distearoyl-sn-glycero-3-phosphoethanolamine-N-[methoxy(polyethylene glycol)-2000] (PEG2k-DSPE), 1,2-distearoyl-sn-glycerol, methoxypoly ethylene glycol (PEG2k-DSG), poly(ethylene glycol)-2000-dimethacrylate (PEG2k-DMA), and 1,2-distearyloxypropyl-3-amine-N-[methoxy(polyethylene glycol)-2000] (PEG2k-DSA). In one particular example, the stealth lipid may be PEG2k-DMG.

[0565] In some embodiments, the PEG lipid includes a glycerol group. In some embodiments, the PEG lipid includes a dimyristoylglycerol (DMG) group. In some embodiments, the PEG lipid comprises PEG2k. In some embodiments, the PEG lipid is a PEG-DMG. In some embodiments, the PEG lipid is a PEG2k-DMG. In some embodiments, the PEG lipid is 1,2-dimyristoyl-rac-glycero-3-methoxypolyethylene glycol-2000. In some embodiments, the PEG2k-DMG is 1,2-dimyristoyl-rac-glycero-3-methoxypolyethylene glycol-2000.

[0566] The LNPs can comprise different respective molar ratios of the component lipids in the formulation. The mol-% of the CCD lipid may be, for example, from about 30 mol-% to about 60 mol-%. The mol-% of the helper lipid may be, for example, from about 30 mol-% to about 60 mol-%. The mol-% of the neutral lipid may be, for example, from about 1 mol-% to about 20 mol-%. The mol-% of the stealth lipid may be, for example, from about 1 mol-% to about 10 mol-%

[0567] The LNPs can have different ratios between the positively charged amine groups of the biodegradable lipid (N) and the negatively charged phosphate groups (P) of the nucleic acid to be encapsulated. This may be mathematically represented by the equation N/P. For example, the N/P ratio may be from about 0.5 to about 100. The N/P ratio can also be from about 4 to about 6.

[0568] In some LNPs, the cargo can comprise Cas mRNA (e.g., Cas9 mRNA) and gRNA. The Cas mRNA and gRNAs can be in different ratios. For example, the LNP formulation can include a ratio of Cas mRNA to gRNA nucleic acid ranging from about 25:1 to about 1:25. Alternatively, the LNP formulation can include a ratio of Cas mRNA to gRNA nucleic acid of from about 2:1 to about 1:2. In specific examples, the ratio of Cas mRNA to gRNA can be about 2:1.

[0569] In some LNPs, the cargo can comprise a nucleic acid construct encoding a multidomain therapeutic protein and gRNA. The nucleic acid construct encoding a multidomain therapeutic protein and gRNAs can be in different ratios. For example, the LNP formulation can include a ratio of nucleic acid construct to gRNA nucleic acid ranging from about 25:1 to about 1:25.

[0570] A specific example of a suitable LNP has a nitrogen-to-phosphate (N/P) ratio of about 4.5 and contains biodegradable cationic lipid, cholesterol, DSPC, and PEG2k-DMG in an about 45:44:9:2 molar ratio (about 45:about 44:about 9:about 2). The biodegradable cationic lipid can be (9Z,12Z)-3-((4,4-bis(octyloxy)butanoyl)oxy)-2-((((3-(diethylamino)propoxy)carbonyl)oxy)methyl)propyl octadeca-9,12-dienoate, also called 3-((4,4-bis(octyloxy)butanoyl)oxy)-2-((((3-(diethylamino)propoxy)carbonyl)oxy)methyl)propyl (9Z,12Z)-octadeca-9,12-dienoate. See, e.g., Finn et al. (2018) Cell Rep. 22(9):2227-2235, herein incorporated by reference in its entirety for all purposes. The Cas9 mRNA can be in an about 1:1 (about 1:about 1) ratio by weight to the guide RNA. Another specific example of a suitable LNP contains Dlin-MC3-DMA (MC3), cholesterol, DSPC, and PEG-DMG in an about 50:38.5:10:1.5 molar ratio (about 50:about 38.5:about 10:about 1.5). The Cas9 mRNA can be in an about 1:2 ratio (about 1:about 2) by weight to the guide RNA. The Cas9 mRNA can be in an about 1:1 ratio (about 1:about 1) by weight to the guide RNA. The Cas9 mRNA can be in an about 2:1 ratio (about 2:about 1) by weight to the guide RNA.

[0571] Another specific example of a suitable LNP has a nitrogen-to-phosphate (N/P) ratio of about 6 and contains biodegradable cationic lipid, cholesterol, DSPC, and PEG2k-DMG in an about 50:38:9:3 molar ratio (about 50:about 38:about 9:about 3). The biodegradable cationic lipid can be Lipid A ((9Z,12Z)-3-((4,4-bis(octyloxy)butanoyl)oxy)-2-((((3-(diethylamino)propoxy)carbonyl)oxy)methyl)propyl octadeca-9,12-dienoate, also called 3-((4,4-bis(octyloxy)butanoyl)oxy)-2-((((3-(diethylamino)propoxy)carbonyl)oxy)methyl)propyl (9Z,12Z)-octadeca-9,12-dienoate). The Cas9 mRNA can be in an about 1:2 ratio (about 1:about 2) by weight to the guide RNA. The Cas9 mRNA can be in an about 1:1 ratio (about 1:about 1) by weight to the guide RNA. The Cas9 mRNA can be in an about 2:1 (about 2:about 1) ratio by weight to the guide RNA.

[0572] Another specific example of a suitable LNP has a nitrogen-to-phosphate (N/P) ratio of about 3 and contains a cationic lipid, a structural lipid, cholesterol (e.g., cholesterol (ovine) (Avanti 700000)), and PEG2k-DMG (e.g., PEG-DMG 2000 (NOF America-SUNBRIGHT® GM-020(DMG-PEG)) in an about 50:10:38.5:1.5 ratio (about 50:about 10:about 38.5:about 1.5) or an about 47:10:42:1 ratio (about 47:about 10:about 42:about 1). The structural lipid can be, for example, DSPC (e.g., DSPC (Avanti 850365)), SOPC, DOPC, or DOPE. The cationic/ionizable lipid can be, for example, Dlin-MC3-DMA (e.g., Dlin-MC3-DMA (Biofine International)). The Cas9 mRNA can be in an about 1:2 ratio (about 1:about 2) by weight to the guide RNA. The Cas9 mRNA can be in an about 1:1 ratio (about 1:about 1) by weight to the guide RNA. The Cas9 mRNA can be in an about 2:1 ratio (about 2:about 1) by weight to the guide RNA.

[0573] Another specific example of a suitable LNP contains Dlin-MC3-DMA, DSPC, cholesterol, and a PEG lipid in an about 45:9:44:2 ratio (about 45:about 9:about 44:about 2). Another specific example of a suitable LNP contains Dlin-MC3-DMA, DOPE, cholesterol, and PEG lipid or PEG DMG in an about 50:10:39:1 ratio (about 50:about 10:about 39:about 1). Another specific example of a suitable LNP has Dlin-MC3-DMA, DSPC, cholesterol, and PEG2k-DMG at an about 55:10:32.5:2.5 ratio (about 55:about 10:about 32.5:about 2.5). Another specific example of a suitable LNP has Dlin-MC3-DMA, DSPC, cholesterol, and PEG-DMG in an about 50:10:38.5:1.5 ratio (about 50:about 10:about 38.5:about 1.5). Another specific example of a suitable LNP has Dlin-MC3-DMA, DSPC, cholesterol, and PEG-DMG in an about 50:10:38.5:1.5 ratio (about 50:about 10:about 38.5:about 1.5). The Cas9 mRNA can be in an about 1:2 ratio (about 1:about 2) by weight to the guide RNA. The Cas9 mRNA can be in an about 1:1 ratio (about 1:about 1) by weight to the guide RNA. The Cas9 mRNA can be in an about 2:1 ratio (about 2:about 1) by weight to the guide RNA.

[0574] Other examples of suitable LNPs can be found, e.g., in WO 2019/067992, WO 2020/082042, US 2020/0270617, WO 2020/082041, US 2020/0268906, WO 2020/082046 (see, e.g., pp. 85-86), and US 2020/0289628, each of which is herein incorporated by reference in its entirety for all purposes.

### (6) Vectors Comprising Nuclease Agents

[0575] The nuclease agents disclosed herein (e.g., ZFN, TALEN, or CRISPR/Cas) can be provided in a vector for expression. A vector can comprise additional sequences such as, for example, replication origins, promoters, and genes encoding antibiotic resistance.

[0576] Some vectors may be circular. Alternatively, the vector may be linear. The vector can be in the packaged for delivered via a lipid nanoparticle, liposome, non-lipid nanoparticle, or viral capsid. Non-limiting exemplary vectors include plasmids, phagemids, cosmids, artificial chromosomes, minichromosomes, transposons, viral vectors, and expression vectors.

[0577] Introduction of nucleic acids can also be accomplished by virus-mediated delivery, such as AAV-mediated delivery or lentivirus-mediated delivery. The vectors can be, for example, viral vectors such as adeno-associated virus (AAV) vectors. The AAV may be any suitable serotype and may be a single-stranded AAV (ssAAV) or a self-complementary AAV (scAAV). Other exemplary viruses/viral vectors include retroviruses, lentiviruses, adenoviruses, vaccinia viruses, poxviruses, and herpes simplex viruses. The viruses can infect dividing cells, non-dividing cells, or both dividing and non-dividing cells. The viruses can integrate into the host genome or alternatively do not integrate into the host genome. Such viruses can also be engineered to have reduced immunity. The viruses can be replication-competent or can be replication-defective (e.g., defective in one or more genes necessary for additional rounds of virion replication and/or packaging). Viral vector may be genetically modified from their wild type counterparts. For example, the viral vector may comprise an insertion, deletion, or substitution of one or more nucleotides to facilitate cloning or such that one or more properties of the vector is changed. Such properties may include packaging capacity, transduction efficiency, immunogenicity, genome integration, replication, transcription, and translation. In some examples, a portion of the viral genome may be deleted such that the virus is capable of packaging exogenous sequences having a larger size. In some examples, the viral vector may have an enhanced transduction efficiency. In some examples, the immune response induced by the virus in a host may be reduced. In some examples, viral genes (such as integrase) that promote integration of the viral sequence into a host genome may be mutated such that the virus becomes non-integrating. In some examples, the viral vector may be replication defective. In some examples, the viral vector may comprise exogenous transcriptional or translational control sequences to drive expression of coding sequences on the vector. In some examples, the virus may be helper-dependent. For example, the virus may need one or more helper virus to supply viral components (such as viral proteins) required to amplify and package the vectors into viral particles. In such a case, one or more helper components, including one or more vectors encoding the viral components, may be introduced into a host cell or population of host cells along with the vector system described herein. In other examples, the virus may be helper-free. For example, the virus may be capable of amplifying and packaging the vectors without a helper virus. In some examples, the vector system described herein may also encode the viral components required for virus amplification and packaging.

[0578] Exemplary viral titers (e.g., AAV titers) include about 10¹² to about 10¹⁶ vg/mL. Other exemplary viral titers (e.g., AAV titers) include about 10¹² to about 10¹⁶ vg/kg of body weight.

[0579] Adeno-associated viruses (AAVs) are endemic in multiple species including human and non-human primates (NHPs). At least 12 natural serotypes and hundreds of natural variants have been isolated and characterized to date. See, e.g., Li et al. (2020) Nat. Rev. Genet. 21:255-272, herein incorporated by reference in its entirety for all purposes. AAV particles are naturally composed of a non-enveloped icosahedral protein capsid containing a single-stranded DNA (ssDNA) genome. The DNA genome is flanked by two inverted terminal repeats (ITRs) which serve as the viral origins of replication and packaging signals. The rep gene encodes four proteins required for viral replication and packaging whilst the cap gene encodes the three structural capsid subunits which dictate the AAV serotype, and the Assembly Activating Protein (AAP) which promotes virion assembly in some serotypes.

[0580] Recombinant AAV (rAAV) is currently one of the most commonly used viral vectors used in gene therapy to treat human diseases by delivering therapeutic transgenes to target cells in vivo. Indeed, rAAV vectors are composed of icosahedral capsids similar to natural AAVs, but rAAV virions do not encapsidate AAV protein-coding or AAV replicating sequences. These viral vectors are non-replicating. The only viral sequences required in rAAV vectors are the two ITRs, which are needed to guide genome replication and packaging during manufacturing of the rAAV vector. rAAV genomes are devoid of AAV rep and cap genes, rendering them non-replicating in vivo. rAAV vectors are produced by expressing rep and cap genes along with additional viral helper proteins in trans, in combination with the intended transgene cassette flanked by AAV ITRs.

[0581] In therapeutic rAAV genomes, a gene expression cassette is placed between ITR sequences. Typically, rAAV genome cassettes comprise of a promoter to drive expression of a therapeutic transgene, followed by polyadenylation sequence. The ITRs flanking a rAAV expression cassette are usually derived from AAV2, the first serotype to be isolated and converted into a recombinant viral vector. Since then, most rAAV production methods rely on AAV2 Rep-based packaging systems. See, e.g., Colella et al. (2017) Mol. Ther. Methods Clin. Dev. 8:87-104, herein incorporated by reference in its entirety for all purposes.

[0582] Some non-limiting examples of ITRs that can be used include ITRs comprising, consisting essentially of, or consisting of SEQ ID NO: 158, SEQ ID NO: 159, or SEQ ID NO: 160. Other examples of ITRs comprise one or more mutations compared to SEQ ID NO: 158, SEQ ID NO: 159, or SEQ ID NO: 160 and can be at least 90%, at least 91%, at least 92%, at least 93%, at least 94%, at least 95%, at least 96%, at least 97%, at least 98%, or at least 99% identical to SEQ ID NO: 158, SEQ ID NO: 159, or SEQ ID NO: 160. In some rAAV genomes disclosed herein, the nucleic acid encoding the nuclease agent (or component thereof) is flanked on both sides by the same ITR (i.e., the ITR on the 5′ end, and the reverse complement of the ITR on the 3′ end, such as SEQ ID NO: 158 on the 5′ end and SEQ ID NO: 168 on the 3′ end, or SEQ ID NO: 159 on the 5′ end and SEQ ID NO: 613 on the 3′ end, or SEQ ID NO: 160 on the 5′ end and SEQ ID NO: 614 on the 3′ end). In one example, the ITR on each end can comprise, consist essentially of, or consist of SEQ ID NO: 158 (i.e., SEQ ID NO: 158 on the 5′ end, and the reverse complement on the 3′ end). In another example, the ITR on each end can comprise, consist essentially of, or consist of SEQ ID NO: 159 (i.e., SEQ ID NO: 159 on the 5′ end, and the reverse complement on the 3′ end). In one example, the ITR on at least one end comprises, consists essentially of, or consists of SEQ ID NO: 160. In one example, the ITR on the 5′ end comprises, consists essentially of, or consists of SEQ ID NO: 160. In one example, the ITR on the 3′ end comprises, consists essentially of, or consists of SEQ ID NO: 160. In one example, the ITR on each end can comprise, consist essentially of, or consist of SEQ ID NO: 160 (i.e., SEQ ID NO: 160 on the 5′ end, and the reverse complement on the 3′ end). In one example, the ITR on each end can comprise, consist essentially of, or consist of SEQ ID NO: 160. In other rAAV genomes disclosed herein, the nucleic acid encoding the nuclease agent (or component thereof) is flanked by different ITRs on each end. In one example, the ITR on one end comprises, consists essentially of, or consists of SEQ ID NO: 158, and the ITR on the other end comprises, consists essentially of, or consists of SEQ ID NO: 159. In another example, the ITR on one end comprises, consists essentially of, or consists of SEQ ID NO: 158, and the ITR on the other end comprises, consists essentially of, or consists of SEQ ID NO: 160. In one example, the ITR on one end comprises, consists essentially of, or consists of SEQ ID NO: 159, and the ITR on the other end comprises, consists essentially of, or consists of SEQ ID NO: 160.

[0583] The specific serotype of a recombinant AAV vector influences its in vivo tropism to specific tissues. AAV capsid proteins are responsible for mediating attachment and entry into target cells, followed by endosomal escape and trafficking to the nucleus. Thus, the choice of serotype when developing a rAAV vector will influence what cell types and tissues the vector is most likely to bind to and transduce when injected in vivo. Several serotypes of rAAVs, including rAAV8, are capable of transducing the liver when delivered systemically in mice, NHPs and humans. See, e.g., Li et al. (2020) Nat. Rev. Genet. 21:255-272, herein incorporated by reference in its entirety for all purposes.

[0584] Once in the nucleus, the ssDNA genome is released from the virion and a complementary DNA strand is synthesized to generate a double-stranded DNA (dsDNA) molecule. Double-stranded AAV genomes naturally circularize via their ITRs and become episomes which will persist extrachromosomally in the nucleus. Therefore, for episomal gene therapy programs, rAAV-delivered rAAV episomes provide long-term, promoter-driven gene expression in non-dividing cells. However, this rAAV-delivered episomal DNA is diluted out as cells divide. In contrast, the gene therapy described herein is based on gene insertion to allow long-term gene expression.

[0585] When specific rAAVs comprising specific sequences (e.g., specific bidirectional construct sequences or specific unidirectional construct sequences) are disclosed herein, they are meant to encompass the sequence disclosed or the reverse complement of the sequence. For example, if a bidirectional or unidirectional construct disclosed herein consists of the hypothetical sequence 5′-CTGGACCGA-3′, it is also meant to encompass the reverse complement of that sequence (5′-TCGGTCCAG-3′). Likewise, when rAAVs comprising bidirectional or unidirectional construct elements in a specific 5′ to 3′ order are disclosed herein, they are also meant to encompass the reverse complement of the order of those elements. For example, if an rAAV is disclosed herein that comprises a bidirectional construct that comprises from 5′ to 3′ a first splice acceptor, a first coding sequence, a first terminator, a reverse complement of a second terminator, a reverse complement of a second coding sequence, and a reverse complement of a second splice acceptor, it is also meant to encompass a construct comprising from 5′ to 3′ the second splice acceptor, the second coding sequence, the second terminator, a reverse complement of the first terminator, a reverse complement of the first coding sequence, and a reverse complement of the first splice acceptor. Single-stranded AAV genomes are packaged as either sense (plus-stranded) or anti-sense (minus-stranded genomes), and single-stranded AAV genomes of + and −polarity are packaged with equal frequency into mature rAAV virions. See, e.g., LING et al. (2015) J. Mol. Genet. Med. 9(3):175, Zhou et al. (2008) Mol. Ther. 16(3):494-499, and Samulski et al. (1987) J. Virol. 61:3096-3101, each of which is herein incorporated by reference in its entirety for all purposes.

[0586] The ssDNA AAV genome consists of two open reading frames, Rep and Cap, flanked by two inverted terminal repeats that allow for synthesis of the complementary DNA strand. When constructing an AAV transfer plasmid, the transgene is placed between the two ITRs, and Rep and Cap can be supplied in trans. In addition to Rep and Cap, AAV can require a helper plasmid containing genes from adenovirus. These genes (E4, E2a, and VA) mediate AAV replication. For example, the transfer plasmid, Rep/Cap, and the helper plasmid can be transfected into HEK293 cells containing the adenovirus gene E1+ to produce infectious AAV particles. Alternatively, the Rep, Cap, and adenovirus helper genes may be combined into a single plasmid. Similar packaging cells and methods can be used for other viruses, such as retroviruses.

[0587] Multiple serotypes of AAV have been identified. These serotypes differ in the types of cells they infect (i.e., their tropism), allowing preferential transduction of specific cell types. The term AAV includes, for example, AAV1, AAV2, AAV3, AAV3B, AAV4, AAV5, AAV6, AAV6.2, AAV7, AAVrh.64R1, AAVhu.37, AAVrh.8, AAVrh.32.33, AAV8, AAV9, AAV-DJ, AAV2/8, AAVrh10, AAVLK03, AV10, AAV11, AAV12, rh10, and hybrids thereof, avian AAV, bovine AAV, canine AAV, equine AAV, primate AAV, non-primate AAV, and ovine AAV. The genomic sequences of various serotypes of AAV, as well as the sequences of the native terminal repeats (TRs), Rep proteins, and capsid subunits are known in the art. Such sequences may be found in the literature or in public databases such as GenBank. A “AAV vector” as used herein refers to an AAV vector comprising a heterologous sequence not of AAV origin (i.e., a nucleic acid sequence heterologous to AAV), typically comprising a sequence encoding an exogenous polypeptide of interest (e.g., multidomain therapeutic protein). The construct may comprise an AAV1, AAV2, AAV3, AAV3B, AAV4, AAV5, AAV6, AAV6.2, AAV7, AAVrh.64R1, AAVhu.37, AAVrh.8, AAVrh.32.33, AAV8, AAV9, AAV-DJ, AAV2/8, AAVrh10, AAVLK03, AV10, AAV11, AAV12, rh10, and hybrids thereof, avian AAV, bovine AAV, canine AAV, equine AAV, primate AAV, non-primate AAV, and ovine AAV capsid sequence. In general, the heterologous nucleic acid sequence (the transgene) is flanked by at least one, and generally by two, AAV inverted terminal repeat sequences (ITRs). An AAV vector may either be single-stranded (ssAAV) or self-complementary (scAAV). Examples of serotypes for liver tissue include AAV3B, AAV5, AAV6, AAV7, AAV8, AAV9, AAVrh.74, and AAVhu.37, and particularly AAV8. In a specific example, the AAV vector comprising the nucleic acid construct can be recombinant AAV8 (rAAV8). A rAAV8 vector as described herein is one in which the capsid is from AAV8. For example, an AAV vector using ITRs from AAV2 and a capsid of AAV8 is considered herein to be a rAAV8 vector.

[0588] Tropism can be further refined through pseudotyping, which is the mixing of a capsid and a genome from different viral serotypes. For example, AAV2/5 indicates a virus containing the genome of serotype 2 packaged in the capsid from serotype 5. Use of pseudotyped viruses can improve transduction efficiency, as well as alter tropism. Hybrid capsids derived from different serotypes can also be used to alter viral tropism. For example, AAV-DJ contains a hybrid capsid from eight serotypes and displays high infectivity across a broad range of cell types in vivo. AAV-DJ8 is another example that displays the properties of AAV-DJ but with enhanced brain uptake. AAV serotypes can also be modified through mutations. Examples of mutational modifications of AAV2 include Y444F, Y500F, Y730F, and S662V. Examples of mutational modifications of AAV3 include Y705F, Y731F, and T492V. Examples of mutational modifications of AAV6 include S663V and T492V. Other pseudotyped/modified AAV variants include AAV2/1, AAV2/6, AAV2/7, AAV2/8, AAV2/9, AAV2.5, AAV8.2, and AAV/SASTG.

[0589] To accelerate transgene expression, self-complementary AAV (scAAV) variants can be used. Because AAV depends on the cell's DNA replication machinery to synthesize the complementary strand of the AAV's single-stranded DNA genome, transgene expression may be delayed. To address this delay, scAAV containing complementary sequences that are capable of spontaneously annealing upon infection can be used, eliminating the requirement for host cell DNA synthesis. However, single-stranded AAV (ssAAV) vectors can also be used.

[0590] To increase packaging capacity, longer transgenes may be split between two AAV transfer plasmids, the first with a 3′ splice donor and the second with a 5′ splice acceptor. Upon co-infection of a cell, these viruses form concatemers, are spliced together, and the full-length transgene can be expressed. Although this allows for longer transgene expression, expression is less efficient. Similar methods for increasing capacity utilize homologous recombination. For example, a transgene can be divided between two transfer plasmids but with substantial sequence overlap such that co-expression induces homologous recombination and expression of the full-length transgene.

[0591] In certain AAVs, the cargo can include nucleic acids encoding one or more guide RNAs (e.g., DNA encoding a guide RNA, or DNA encoding two or more guide RNAs). In certain AAVs, the cargo can include a nucleic acid (e.g., DNA) encoding a Cas nuclease, such as Cas9, and DNA encoding one or more guide RNAs (e.g., DNA encoding a guide RNA, or DNA encoding two or more guide RNAs). In certain AAVs, the cargo can include a nucleic acid construct encoding a multidomain therapeutic protein. In certain AAVs, the cargo can include a nucleic acid (e.g., DNA) encoding a Cas nuclease, such as Cas9, a DNA encoding a guide RNA (or multiple guide RNAs), and a nucleic acid construct encoding a multidomain therapeutic protein.

[0592] For example, Cas or Cas9 and one or more gRNAs (e.g., 1 gRNA or 2 gRNAs or 3 gRNAs or 4 gRNAs) can be delivered via LNP-mediated delivery (e.g., in the form of RNA) or adeno-associated virus (AAV)-mediated delivery (e.g., rAAV8-mediated delivery). For example, a Cas9 mRNA and a gRNA can be delivered via LNP-mediated delivery, or DNA encoding Cas9 and DNA encoding a gRNA can be delivered via AAV-mediated delivery. The Cas or Cas9 and the gRNA(s) can be delivered in a single AAV or via two separate AAVs. For example, a first AAV can carry a Cas or Cas9 expression cassette, and a second AAV can carry a gRNA expression cassette. Similarly, a first AAV can carry a Cas or Cas9 expression cassette, and a second AAV can carry two or more gRNA expression cassettes. Alternatively, a single AAV can carry a Cas or Cas9 expression cassette (e.g., Cas or Cas9 coding sequence operably linked to a promoter) and a gRNA expression cassette (e.g., gRNA coding sequence operably linked to a promoter). Similarly, a single AAV can carry a Cas or Cas9 expression cassette (e.g., Cas or Cas9 coding sequence operably linked to a promoter) and two or more gRNA expression cassettes (e.g., gRNA coding sequences operably linked to promoters). Different promoters can be used to drive expression of the gRNA, such as a U6 promoter or the small tRNA Gln. Likewise, different promoters can be used to drive Cas9 expression. For example, small promoters are used so that the Cas9 coding sequence can fit into an AAV construct. Similarly, small Cas9 proteins (e.g., SaCas9 or CjCas9 are used to maximize the AAV packaging capacity).

### C. Cells or Animals or Genomes

[0593] Cells or animals (i.e., subjects) comprising any of the above compositions (e.g., multidomain therapeutic protein, nucleic acid construct encoding a multidomain therapeutic protein, nuclease agents, vectors, lipid nanoparticles, or any combination thereof) are also provided herein. Such cells or animals (or genomes) can be produced by the methods disclosed herein. For example, the cells or animals can comprise any of the multidomain therapeutic proteins described herein, any of the nucleic acid constructs encoding a multidomain therapeutic protein described herein, any of the nuclease agents disclosed herein, or both. Such cells or animals (or genomes) can be neonatal cells or animals (or genomes). Alternatively, such cells or animals (or genomes) can be non-neonatal cells or animals (or genomes).

[0594] A neonatal subject (e.g., animal) can be a human subject up to or under the age of 1 year (52 weeks), preferably up to or under the age of 24 weeks, more preferably up to or under the age of 12 weeks, more preferably up to or under the age of 8 weeks, and even more preferably up to or under the age of 4 weeks. In certain embodiments, a neonatal human subject is up to 4 weeks of age. In certain embodiments, a neonatal human subject is up to 8 weeks of age. In another embodiment, a neonatal human subject is within 3 weeks after birth. In another embodiment, a neonatal human subject is within 2 weeks after birth. In another embodiment, a neonatal human subject is within 1 week after birth. In another embodiment, a neonatal human subject is within 7 days after birth. In another embodiment, a neonatal human subject is within 6 days after birth. In another embodiment, a neonatal human subject is within 5 days after birth. In another embodiment, a neonatal human subject is within 4 days after birth. In another embodiment, a neonatal human subject is within 3 days after birth. In another embodiment, a neonatal human subject is within 2 days after birth. In another embodiment, a neonatal human subject is within 1 day after birth. The time windows disclosed above are for human subjects and are also meant to cover the corresponding developmental time windows for other animals.

[0595] Neonatal cells can be cells of any neonatal subject. For example, they can be of a human subject up to or under the age of 1 year (52 weeks), preferably up to or under the age of 24 weeks, more preferably up to or under the age of 12 weeks, more preferably up to or under the age of 8 weeks, and even more preferably up to or under the age of 4 weeks. In certain embodiments, a neonatal human subject is up to 4 weeks of age. In certain embodiments, a neonatal human subject is up to 8 weeks of age. In another embodiment, a neonatal human subject is within 3 weeks after birth. In another embodiment, a neonatal human subject is within 2 weeks after birth. In another embodiment, a neonatal human subject is within 1 week after birth. In another embodiment, a neonatal human subject is within 7 days after birth. In another embodiment, a neonatal human subject is within 6 days after birth. In another embodiment, a neonatal human subject is within 5 days after birth. In another embodiment, a neonatal human subject is within 4 days after birth. In another embodiment, a neonatal human subject is within 3 days after birth. In another embodiment, a neonatal human subject is within 2 days after birth. In another embodiment, a neonatal human subject is within 1 day after birth. The time windows disclosed above are for human subjects and are also meant to cover the corresponding developmental time windows for other animals.

[0596] In some such cells or animals or genomes, a nucleic acid construct encoding a multidomain therapeutic protein can be genomically integrated at a target genomic locus, such as a safe harbor locus (e.g., an ALB locus or a human ALB locus, such as intron 1 of an ALB locus or a human ALB locus). In some such cells, animals, or genomes, the multidomain therapeutic protein encoded by the nucleic acid construct is expressed in the cell, animal, or genome. For example, if the nucleic acid construct encoding a multidomain therapeutic protein is integrated into an ALB locus (e.g., intron 1 of a human ALB locus), the multidomain therapeutic protein can be expressed from the ALB locus. The coding sequence for the multidomain therapeutic protein can be operably linked to an endogenous promoter at the target genomic locus upon integration into the target genomic locus, or it can be operably linked to an exogenous promoter present in the nucleic acid construct. If the nucleic acid construct is a bidirectional nucleic acid construct disclosed herein, the genome, cell, or animal can express the first multidomain therapeutic protein or can express the second multidomain therapeutic protein. In some genomes, cells, or animals, the target genomic locus is an ALB locus. For example, the nucleic acid construct can be genomically integrated in intron 1 of the endogenous ALB locus. Endogenous ALB exon 1 can then splice into the coding sequence for the multidomain therapeutic protein in the nucleic acid construct. In some cells, the percentage of unintended transcripts from the target genomic locus containing comprising the integrated nucleic acid construct or coding sequence for the multidomain therapeutic protein is less than about 10%, less than about 9%, less than about 8%, less than about 7%, less than about 6%, less than about 5%, less than about 4%, less than about 3%, less than about 2%, or less than about 1%. In some cells, the percentage of unintended transcripts from the target genomic locus containing comprising the inserted nucleic acid construct or coding sequence for the multidomain therapeutic protein is less than about 5%. In some cells, the percentage of unintended transcripts from the target genomic locus containing comprising the inserted nucleic acid construct or coding sequence for the multidomain therapeutic protein is less than about 4%. In some cells, the percentage of unintended transcripts from the target genomic locus containing comprising the inserted nucleic acid construct or coding sequence for the multidomain therapeutic protein is less than about 3%. In some cells, the percentage of unintended transcripts from the target genomic locus containing comprising the inserted nucleic acid construct or coding sequence for the multidomain therapeutic protein is less than about 2%. In some cells, the percentage of unintended transcripts from the target genomic locus containing comprising the inserted nucleic acid construct or coding sequence for the multidomain therapeutic protein is less than about 1%. The percentage of unintended transcripts means the percentage of all transcripts from the target genomic locus with the inserted nucleic acid construct or coding sequence for the multidomain therapeutic protein that are unintended transcripts and not the intended transcript from the nucleic acid construct being inserted (e.g., transcripts formed by splicing from cryptic splice donors or into cryptic splice acceptors).

[0597] The target genomic locus at which the nucleic acid construct is stably integrated can be heterozygous for the nucleic acid construct encoding a multidomain therapeutic protein or homozygous for the nucleic acid construct encoding a multidomain therapeutic protein. A diploid organism has two alleles at each genetic locus. Each pair of alleles represents the genotype of a specific genetic locus. Genotypes are described as homozygous if there are two identical alleles at a particular locus and as heterozygous if the two alleles differ.

[0598] The cells, animals, or genomes can be from any suitable species, such as eukaryotic cells or eukaryotes, or mammalian cells or mammals (e.g., non-human mammalian cells or non-human mammals, or human cells or humans). A mammal can be, for example, a non-human mammal, a human, a rodent, a rat, a mouse, or a hamster. Other non-human mammals include, for example, non-human primates, e.g., monkeys and apes. The term “non-human” excludes humans. Examples include, but are not limited to, human cells/humans, rodent cells/rodents, mouse cells/mice, rat cells/rats, and non-human primate cells/non-human primates. In a specific example, the cell is a human cell or the animal is a human. Likewise, cells can be any suitable type of cell. In a specific example, the cell is a liver cell such as a hepatocyte (e.g., a human liver cell or human hepatocyte).

[0599] The cells can be isolated cells (e.g., in vitro), ex vivo cells, or can be in vivo within an animal (i.e., in a subject). The cells can be mitotically competent cells or mitotically-inactive cells, meiotically competent cells or meiotically-inactive cells. Similarly, the cells can also be primary somatic cells or cells that are not a primary somatic cell. Somatic cells include any cell that is not a gamete, germ cell, gametocyte, or undifferentiated stem cell. For example, the cells can be liver cells, such as hepatocytes (e.g., mouse, non-human primate, or human hepatocytes).

[0600] The cells provided herein can be normal, healthy cells, or can be diseased or mutant-bearing cells. For example, the cells can have a deficiency of ASM or can be from a subject with deficiency of ASM. For example, the cells can have an ASM deficiency (ASMD), can carry a mutation that results in an ASMD, or can be from a subject with an ASM deficiency carrying a mutation that results in an ASMD. For example, the cells can be from a subject with ASMD. In some embodiments, the cells are of a neonatal subject.

[0601] The cells provided herein can be dividing cells (e.g., actively dividing cells). Alternatively, the cells provided herein can be non-dividing cells.

### III. Therapeutic Methods and Methods for Introducing Multidomain Therapeutic Proteins or Introducing, Integrating, or Expressing a Nucleic Acid Encoding a Multidomain Therapeutic Protein in Cells or Subjects

[0602] The multidomain therapeutic proteins and compositions disclosed herein can be used in methods of introducing a multidomain therapeutic protein into a cell, a population of cells, or a subject, methods of treating ASM deficiency (ASMD, such as Niemann-Pick disease type A, Niemann-Pick disease type B, or Niemann-Pick disease type A/B) in a subject, and methods or preventing or reducing the onset of a sign or symptom of ASMD in a subject. The multidomain therapeutic protein nucleic acid constructs and compositions disclosed herein can be used in methods of introducing a nucleic acid construct encoding a multidomain therapeutic protein into a cell or a population of cells or a subject (e.g., in a cell or population of cells in a subject), methods of inserting or integrating a nucleic acid encoding a multidomain therapeutic protein into a target genomic locus in a cell or a population of cells or a subject (e.g., in a cell or population of cells in a subject), methods of expressing a multidomain therapeutic protein in a cell or a population of cells or a subject (e.g., in a cell or population of cells in a subject), methods of treating ASMD in a subject, and methods or preventing or reducing the onset of a sign or symptom of ASMD in a subject. In some methods, the percentage of unintended transcripts from the target genomic locus containing comprising the inserted nucleic acid construct or coding sequence for the multidomain therapeutic protein is less than about 10%, less than about 9%, less than about 8%, less than about 7%, less than about 6%, less than about 5%, less than about 4%, less than about 3%, less than about 2%, or less than about 1%. In some methods, the percentage of unintended transcripts from the target genomic locus containing comprising the inserted nucleic acid construct or coding sequence for the multidomain therapeutic protein is less than about 5%. In some methods, the percentage of unintended transcripts from the target genomic locus containing comprising the inserted nucleic acid construct or coding sequence for the multidomain therapeutic protein is less than about 4%. In some methods, the percentage of unintended transcripts from the target genomic locus containing comprising the inserted nucleic acid construct or coding sequence for the multidomain therapeutic protein is less than about 3%. In some methods, the percentage of unintended transcripts from the target genomic locus containing comprising the inserted nucleic acid construct or coding sequence for the multidomain therapeutic protein is less than about 2%. In some methods, the percentage of unintended transcripts from the target genomic locus containing comprising the inserted nucleic acid construct or coding sequence for the multidomain therapeutic protein is less than about 1%. The percentage of unintended transcripts means the percentage of all transcripts from the target genomic locus with the inserted nucleic acid construct or coding sequence for the multidomain therapeutic protein that are unintended transcripts and not the intended transcript from the nucleic acid construct being inserted (e.g., transcripts formed by splicing from cryptic splice donors or into cryptic splice acceptors).

[0603] The multidomain therapeutic protein compositions disclosed herein (e.g., multidomain therapeutic proteins, multidomain therapeutic protein nucleic acid constructs, or multidomain therapeutic protein nucleic acid constructs in combination with the nuclease agents (e.g., CRISPR/Cas systems)) are useful for the treatment of ASMD and/or ameliorating at least one symptom associated with ASMD (e.g., as compared to a control, untreated subject). The multidomain therapeutic protein compositions disclosed herein (e.g., multidomain therapeutic proteins, multidomain therapeutic protein nucleic acid constructs, or multidomain therapeutic protein nucleic acid constructs in combination with the nuclease agents (e.g., CRISPR/Cas systems)) are also useful for preventing or reducing the onset of a sign or symptom of ASMD (e.g., as compared to a control, untreated subject). Likewise, the compositions disclosed herein can be used for the preparation of a pharmaceutical composition or medicament for treating a subject having ASMD.

[0604] With respect to ASMD, the terms “treat,” “treated,” “treating,” and “treatment,” include the administration of the multidomain therapeutic proteins or multidomain therapeutic protein nucleic acid constructs disclosed herein (e.g., together with a nuclease agent disclosed herein) to subjects to prevent or delay the onset of the symptoms, complications, or biochemical indicia of ASMD, alleviating the symptoms or arresting or inhibiting further development of ASMD. Treatment may be prophylactic (to prevent or delay the onset of ASMD, or to prevent the manifestation of clinical or subclinical symptoms thereof) or therapeutic suppression or alleviation of symptoms after the manifestation of ASMD.

[0605] ASM deficiency (ASMD) refers expression and/or activity levels of ASM being lower in the subject than normal ASM expression and/or activity levels, such that the normal functions of ASM are not fully carried out in the subject. Acid sphingomyelinase deficiency (ASMD) is a rare progressive genetic disorder that results from a deficiency of the enzyme acid sphingomyelinase, which is required to break down (metabolize) a fatty substance (lipid) called sphingomyelin. Consequently, sphingomyelin and other substances accumulate in various tissues of the body. ASMD is highly variable and the age of onset, specific symptoms and severity of the disorder can vary dramatically from one person to another, sometimes even among members of the same family. The disorder may be best thought of as a spectrum of disease. At the severe end of the spectrum is a fatal neurodegenerative disorder that presents in infancy (Niemann-Pick disease type A). At the mild end of the spectrum, affected individuals have no or only minimal neurological symptoms and survival into adulthood is common (Niemann-Pick disease type B). Intermediate forms of the disorder exist as well. ASMD is caused by mutations in the SMPD1 gene and is inherited in an autosomal recessive manner. ASMD has traditionally been broken down into two subgroups—neuronopathic (type A) and non-neuronopathic (type B). Neuronopathic refers to disorders that damage brain cells (neurons). Type A generally causes severe neurodegenerative disease during infancy, while type B is generally not considered to be a neurologic disease. However, since cases fall in between these two extremes, such broad designations can be misleading.

[0606] The phenotype of acid sphingomyelinase deficiency (ASMD) occurs along a continuum. Individuals with the severe early-onset form, infantile neurovisceral ASMD, were historically diagnosed with Niemann-Pick disease type A (NPD-A). The later-onset, chronic visceral form of ASMD is also referred to as Niemann-Pick disease type B (NPD-B). A phenotype with intermediate severity is also known as chronic neurovisceral ASMD (NPD-A/B). Enzyme replacement therapy (ERT) is currently FDA approved for the non-central nervous system manifestations of ASMD, regardless of type. As more affected individuals are treated with ERT for longer periods of time, the natural history of ASMD is likely to change. The most common presenting symptom in untreated NPD-A is hepatosplenomegaly, usually detectable by age three months; over time the liver and spleen become massive in size. Growth failure typically becomes evident by the second year of life. Psychomotor development progresses no further than the 12-month level, after which neurologic deterioration is relentless. This feature may not be amenable to ERT. A classic cherry-red spot of the macula of the retina, which may not be present in the first few months, is eventually present in all affected children, although it is unclear if ERT will have an impact on this. Interstitial lung disease caused by storage of sphingomyelin in pulmonary macrophages results in frequent respiratory infections and often respiratory failure. Most untreated children succumb before the third year of life. NPD-B generally presents later than NPD-A, and the manifestations are less severe. NPD-B is characterized in untreated individuals by progressive hepatosplenomegaly, gradual deterioration in liver and pulmonary function, osteopenia, and atherogenic lipid profile. No central nervous system manifestations occur. Individuals with NPD-A/B have symptoms that are intermediate between NPD-A and NPD-B. The presentation in individuals with NPD-A/B varies greatly, although all are characterized by the presence of some central nervous system manifestations. Survival to adulthood can occur in individuals with NPD-B and NPD-A/B, even when untreated.

[0607] The diagnosis of ASMD is established by detection of biallelic pathogenic variants in SMPD1 by molecular genetic testing and residual acid sphingomyelinase enzyme activity that is less than 10% of controls (in peripheral blood lymphocytes or cultured skin fibroblasts).

[0608] Olipudase alfa (Xenpozyme®) enzyme replacement therapy (ERT) helps to reduce the accumulation of sphingomyelin in the lung, liver, spleen, and other non-central nervous system organs. It does not impact the central nervous system and therefore does not impact the neurocognitive issues seen in individuals with NPD-A or NPD-A/B.

[0609] In some embodiments, the ASMD is Niemann-Pick disease type A. This is an early-onset lysosomal storage disorder caused by failure to hydrolyze sphingomyelin to ceramide. It results in the accumulation of sphingomyelin and other metabolically related lipids in reticuloendothelial and other cell types throughout the body, leading to cell death. Niemann-Pick disease type A is a primarily neurodegenerative disorder characterized by onset within the first year of life, intellectual disability, digestive disorders, failure to thrive, major hepatosplenomegaly, and severe neurologic symptoms. The severe neurological disorders and pulmonary infections lead to an early death, often around the age of four. Clinical features are variable. A phenotypic continuum exists between type A (basic neurovisceral) and type B (purely visceral) forms of Niemann-Pick disease, and the intermediate types encompass a cluster of variants combining clinical features of both types A and B.

[0610] In some embodiments, the ASMD is Niemann-Pick disease type B. This is a late-onset lysosomal storage disorder caused by failure to hydrolyze sphingomyelin to ceramide. It results in the accumulation of sphingomyelin and other metabolically related lipids in reticuloendothelial and other cell types throughout the body, leading to cell death. Clinical signs involve only visceral organs. The most constant sign is hepatosplenomegaly which can be associated with pulmonary symptoms. Patients remain free of neurologic manifestations. However, a phenotypic continuum exists between type A (basic neurovisceral) and type B (purely visceral) forms of Niemann-Pick disease, and the intermediate types encompass a cluster of variants combining clinical features of both types A and B. In Niemann-Pick disease type B, onset of the first symptoms occurs in early childhood and patients can survive into adulthood

[0611] In some embodiments, the ASMD is Niemann-Pick disease type A/B.

[0612] The cells or populations of cells can be neonatal cells or populations of neonatal cells, and the subject can be neonatal subjects in some methods of introducing a multidomain therapeutic protein or introducing a nucleic acid construct encoding a multidomain therapeutic protein into a cell or a population of cells or a subject (e.g., in a cell or population of cells in a subject), methods of inserting or integrating a nucleic acid encoding a multidomain therapeutic protein into a target genomic locus in a cell or a population of cells or a subject (e.g., in a cell or population of cells in a subject), methods of expressing a multidomain therapeutic protein in a cell or a population of cells or a subject (e.g., in a cell or population of cells in a subject), and methods of treating ASMD in a subject. A neonatal subject can be a human subject up to or under the age of 1 year (52 weeks), preferably up to or under the age of 24 weeks, more preferably up to or under the age of 12 weeks, more preferably up to or under the age of 8 weeks, and even more preferably up to or under the age of 4 weeks. In certain embodiments, a neonatal human subject is up to 4 weeks of age. In certain embodiments, a neonatal human subject is up to 8 weeks of age. In another embodiment, a neonatal human subject is within 3 weeks after birth. In another embodiment, a neonatal human subject is within 2 weeks after birth. In another embodiment, a neonatal human subject is within 1 week after birth. In another embodiment, a neonatal human subject is within 7 days after birth. In another embodiment, a neonatal human subject is within 6 days after birth. In another embodiment, a neonatal human subject is within 5 days after birth. In another embodiment, a neonatal human subject is within 4 days after birth. In another embodiment, a neonatal human subject is within 3 days after birth. In another embodiment, a neonatal human subject is within 2 days after birth. In another embodiment, a neonatal human subject is within 1 day after birth. The time windows disclosed above are for human subjects and are also meant to cover the corresponding developmental time windows for other animals. As used herein, a “neonatal cell” is a cell of a neonatal subject, and a population of neonatal cells is a population of cells of a neonatal subject. In other methods, the cells or populations of cells are not neonatal cells and are not populations of neonatal cells, and the subjects are not neonatal subjects.

[0613] In one example, provided herein are methods of introducing a multidomain therapeutic protein into a cell or a population of cells or a subject in need thereof (e.g., in a cell or a population of cells in the subject). The cells or populations of cells can be neonatal cells or populations of neonatal cells, and the subject can be neonatal subjects in some methods. In other methods, the cells or populations of cells are not neonatal cells and are not populations of neonatal cells, and the subjects are not neonatal subjects. Such methods can comprise administering any of the multidomain therapeutic proteins described herein (or any of the compositions comprising a multidomain therapeutic protein described herein) to the cell.

[0614] In one example, provided herein are methods of introducing a nucleic acid encoding a multidomain therapeutic protein into a cell or a population of cells or a subject in need thereof (e.g., in a cell or a population of cells in the subject). The cells or populations of cells can be neonatal cells or populations of neonatal cells, and the subject can be neonatal subjects in some methods. In other methods, the cells or populations of cells are not neonatal cells and are not populations of neonatal cells, and the subjects are not neonatal subjects. Such methods can comprise administering any of the multidomain therapeutic protein nucleic acid constructs described herein (or any of the compositions comprising a multidomain therapeutic protein nucleic acid construct described herein, including, for example, vectors or lipid nanoparticles) to the cell. The multidomain therapeutic protein nucleic acid construct can be administered together with a nuclease agent described herein, or can be administered alone. For example, the multidomain therapeutic protein nucleic acid construct can be one that expresses the multidomain therapeutic protein without being integrated into target genomic locus (e.g., an episomal vector or an expression vector in which the coding sequence for the multidomain therapeutic protein is operably linked to a promoter). In some methods, the multidomain therapeutic protein nucleic acid construct can be administered together with a nuclease agent described herein (e.g., simultaneously or sequentially in any order). The nuclease agent can cleave a nuclease target sequence within a target genomic locus (e.g., target gene), the nucleic acid encoding a multidomain therapeutic protein can be inserted into the target genomic locus to create a modified target genomic locus, and the multidomain therapeutic protein can be expressed from the modified target genomic locus. The multidomain therapeutic protein coding sequence can be operably linked to an endogenous promoter at the target genomic locus upon integration into the target genomic locus, or it can be operably linked to an exogenous promoter present in the nucleic acid construct. In one example, the nuclease agent is a CRISPR/Cas system, and the target gene is ALB (e.g., intron 1 of ALB). In such methods, the guide RNA can bind to the Cas protein and target the Cas protein to the guide RNA target sequence in intron 1 of the ALB gene, the Cas protein can cleave the guide RNA target sequence, the nucleic acid encoding a multidomain therapeutic protein can be inserted into the ALB gene to create a modified ALB gene, and multidomain therapeutic protein can be expressed from the modified ALB gene.

[0615] In another example, provided herein are methods of expressing a multidomain therapeutic protein in a cell or a population of cells or a subject in need thereof (e.g., in a cell or a population of cells in the subject). The cells or populations of cells can be neonatal cells or populations of neonatal cells, and the subject can be neonatal subjects in some methods. In other methods, the cells or populations of cells are not neonatal cells and are not populations of neonatal cells, and the subjects are not neonatal subjects. Such methods can comprise administering any of the multidomain therapeutic protein nucleic acid constructs described herein (or any of the compositions comprising a multidomain therapeutic protein nucleic acid construct described herein, including, for example, vectors or lipid nanoparticles) to the cell. In some methods, the multidomain therapeutic protein nucleic acid construct or composition comprising the multidomain therapeutic protein nucleic acid construct can be administered without a nuclease agent (e.g., if the multidomain therapeutic protein nucleic acid construct comprises elements needed for expression of the multidomain therapeutic protein without integration into a target genomic locus). In some methods, the multidomain therapeutic protein nucleic acid construct can be administered together with a nuclease agent described herein (e.g., simultaneously or sequentially in any order). The nuclease agent can cleave a nuclease target sequence within a target genomic locus (e.g., target gene), the nucleic acid encoding a multidomain therapeutic protein can be inserted into the target genomic locus to create a modified target genomic locus, and multidomain therapeutic protein can be expressed from the modified target genomic locus. The multidomain therapeutic protein coding sequence can be operably linked to an endogenous promoter at the target genomic locus upon integration into the target genomic locus, or it can be operably linked to an exogenous promoter present in the nucleic acid construct. In one example, the nuclease agent is a CRISPR/Cas system, and the target gene is ALB (e.g., intron 1 of ALB). In such methods, the guide RNA can bind to the Cas protein and target the Cas protein to the guide RNA target sequence in intron 1 of the ALB gene, the Cas protein can cleave the guide RNA target sequence, the nucleic acid encoding a multidomain therapeutic protein can be inserted into the ALB gene to create a modified ALB gene, and multidomain therapeutic protein can be expressed from the modified ALB gene.

[0616] In another example, provided herein are methods of inserting or integrating a nucleic acid encoding a multidomain therapeutic protein into a target genomic locus in a cell or a population of cells or a subject in need thereof (e.g., in a cell or a population of cells in the subject). The cells or populations of cells can be neonatal cells or populations of neonatal cells, and the subject can be neonatal subjects in some methods. In other methods, the cells or populations of cells are not neonatal cells and are not populations of neonatal cells, and the subjects are not neonatal subjects. Such methods can comprise administering any of the multidomain therapeutic protein nucleic acid constructs described herein (or any of the compositions comprising a multidomain therapeutic protein nucleic acid construct described herein, including, for example, vectors or lipid nanoparticles) to the cell. In some methods, the multidomain therapeutic protein nucleic acid construct or composition comprising the multidomain therapeutic protein nucleic acid construct can be administered together with a nuclease agent described herein (e.g., simultaneously or sequentially in any order). The nuclease agent can cleave a nuclease target sequence within a target genomic locus (e.g., target gene), the nucleic acid encoding a multidomain therapeutic protein can be inserted into the target genomic locus to create a modified target genomic locus, and the multidomain therapeutic protein can be expressed from the modified target genomic locus. The multidomain therapeutic protein coding sequence can be operably linked to an endogenous promoter at the target genomic locus upon integration into the target genomic locus, or it can be operably linked to an exogenous promoter present in the nucleic acid construct. In one example, the nuclease agent is a CRISPR/Cas system, and the target gene is ALB (e.g., intron 1 of ALB). In such methods, the guide RNA can bind to the Cas protein and target the Cas protein to the guide RNA target sequence in intron 1 of the ALB gene, the Cas protein can cleave the guide RNA target sequence, the nucleic acid encoding a multidomain therapeutic protein can be inserted into the ALB gene to create a modified ALB gene, and multidomain therapeutic protein can be expressed from the modified ALB gene.

[0617] In any of the above methods, the cells can be from any suitable species, such as eukaryotic cells or mammalian cells (e.g., non-human mammalian cells or human cells). A mammal can be, for example, a non-human mammal, a human, a rodent, a rat, a mouse, or a hamster. Other non-human mammals include, for example, non-human primates, e.g., monkeys and apes. The term “non-human” excludes humans. Specific examples include, but are not limited to, human cells, rodent cells, mouse cells, rat cells, and non-human primate cells. In a specific example, the cell is a human cell. Likewise, cells can be any suitable type of cell. In a specific example, the cell is a liver cell such as a hepatocyte (e.g., a human liver cell or human hepatocyte). The cells can be neonatal cells, or they can be non-neonatal cells.

[0618] The cells can be isolated cells (e.g., in vitro), ex vivo cells, or can be in vivo within an animal (i.e., in a subject). In a specific example, the cell is in vivo (e.g., in a subject having ASMD). The cells can be mitotically competent cells or mitotically-inactive cells, meiotically competent cells or meiotically-inactive cells. Similarly, the cells can also be primary somatic cells or cells that are not a primary somatic cell. Somatic cells include any cell that is not a gamete, germ cell, gametocyte, or undifferentiated stem cell. For example, the cells can be liver cells, such as hepatocytes (e.g., mouse, non-human primate, or human hepatocytes).

[0619] The cells provided herein can be normal, healthy cells, or can be diseased or mutant-bearing cells. For example, the cells can have a ASMD or can be from a subject with ASMD.

[0620] Also provided are methods of treating ASMD in a subject in need thereof (e.g., a subject with ASM deficiency, such as such as Niemann-Pick disease type A, Niemann-Pick disease type B, or Niemann-Pick disease type A/B). In some methods, the expressed multidomain therapeutic protein is delivered to and internalized by central nervous system tissue in the subject. In some methods, the expressed multidomain therapeutic protein is delivered to and internalized by liver tissue and central nervous system tissue in the subject. Such methods can comprise administering any of the multidomain therapeutic proteins or multidomain therapeutic protein nucleic acid constructs described herein (or any of the compositions comprising a multidomain therapeutic protein or multidomain therapeutic protein nucleic acid construct described herein, including, for example, vectors or lipid nanoparticles) to the subject such that a therapeutically effective level of multidomain therapeutic protein or ASM expression or a therapeutically effective level of circulating multidomain therapeutic protein or ASM is achieved in the subject. In some methods, the multidomain therapeutic protein nucleic acid construct or composition comprising the multidomain therapeutic protein nucleic acid construct can be administered without a nuclease agent (e.g., if the multidomain therapeutic protein nucleic acid construct comprises elements needed for expression of multidomain therapeutic protein without integration into a target genomic locus). In some methods, the multidomain therapeutic protein nucleic acid construct can be administered together with a nuclease agent described herein (e.g., simultaneously or sequentially in any order). The nuclease agent can cleave a nuclease target sequence within a target genomic locus (e.g., target gene), the nucleic acid encoding a multidomain therapeutic protein can be inserted into the target genomic locus to create a modified target genomic locus, and the multidomain therapeutic protein can be expressed from the modified target genomic locus (e.g., such that a therapeutically effective level of multidomain therapeutic protein or ASM expression or a therapeutically effective level of circulating multidomain therapeutic protein or ASM is achieved in the subject). The multidomain therapeutic protein coding sequence can be operably linked to an endogenous promoter at the target genomic locus upon integration into the target genomic locus, or it can be operably linked to an exogenous promoter present in the nucleic acid construct. In one example, the nuclease agent is a CRISPR/Cas system, and the target gene is ALB (e.g., intron 1 of ALB). In such methods, the guide RNA can bind to the Cas protein and target the Cas protein to the guide RNA target sequence in intron 1 of the ALB gene, the Cas protein can cleave the guide RNA target, the nucleic acid encoding a multidomain therapeutic protein can be inserted into the ALB gene to create a modified ALB gene, and multidomain therapeutic protein can be expressed from the modified ALB gene (e.g., such that a therapeutically effective level of multidomain therapeutic protein or ASM expression or a therapeutically effective level of circulating multidomain therapeutic protein or ASM is achieved in the subject).

[0621] Treatment refers to any administration or application of a therapeutic for disease or disorder in a subject, and includes inhibiting the disease, arresting its development, relieving one or more symptoms of the disease, curing the disease, or preventing reoccurrence of one or more symptoms of the disease. For example, treatment of ASMD may comprise alleviating symptoms of ASMD.

[0622] Also provided are methods of preventing or reducing the onset of a sign or symptom of ASMD in a subject (e.g., as compared to an untreated, control subject). By preventing is meant the sign or symptom of the ASMD never becomes present. Such signs and symptoms are well-known and are described in more detail elsewhere herein. Such methods can comprise administering any of the multidomain therapeutic proteins or multidomain therapeutic protein nucleic acid constructs described herein (or any of the compositions comprising a multidomain therapeutic protein or multidomain therapeutic protein nucleic acid construct described herein, including, for example, vectors or lipid nanoparticles) to the subject such that a therapeutically effective level of multidomain therapeutic protein or ASM expression or a therapeutically effective level of circulating multidomain therapeutic protein or ASM is achieved in the subject. In some methods, the multidomain therapeutic protein nucleic acid construct or composition comprising the multidomain therapeutic protein nucleic acid construct can be administered without a nuclease agent (e.g., if the multidomain therapeutic protein nucleic acid construct comprises elements needed for expression of multidomain therapeutic protein without integration into a target genomic locus). In some methods, the multidomain therapeutic protein nucleic acid construct can be administered together with a nuclease agent described herein (e.g., simultaneously or sequentially in any order). The nuclease agent can cleave a nuclease target sequence within a target genomic locus (e.g., target gene), the nucleic acid encoding a multidomain therapeutic protein can be inserted into the target genomic locus to create a modified target genomic locus, and the multidomain therapeutic protein can be expressed from the modified target genomic locus (e.g., such that a therapeutically effective level of multidomain therapeutic protein or ASM expression or a therapeutically effective level of circulating multidomain therapeutic protein or ASM is achieved in the subject). The multidomain therapeutic protein coding sequence can be operably linked to an endogenous promoter at the target genomic locus upon integration into the target genomic locus, or it can be operably linked to an exogenous promoter present in the nucleic acid construct. In one example, the nuclease agent is a CRISPR/Cas system, and the target gene is ALB (e.g., intron 1 of ALB). In such methods, the guide RNA can bind to the Cas protein and target the Cas protein to the guide RNA target sequence in intron 1 of the ALB gene, the Cas protein can cleave the guide RNA target, the nucleic acid encoding a multidomain therapeutic protein can be inserted into the ALB gene to create a modified ALB gene, and multidomain therapeutic protein can be expressed from the modified ALB gene (e.g., such that a therapeutically effective level of multidomain therapeutic protein or ASM expression or a therapeutically effective level of circulating multidomain therapeutic protein or ASM is achieved in the subject).

[0623] In some methods, a therapeutically effective amount of the multidomain therapeutic protein nucleic acid construct or the composition comprising the multidomain therapeutic protein nucleic acid construct or the combination of the multidomain therapeutic protein nucleic acid construct and the nuclease agent (e.g., CRISPR/Cas system) is administered to the subject. A therapeutically effective amount is an amount that produces the desired effect for which it is administered. The exact amount will depend on the purpose of the treatment, and will be ascertainable by one skilled in the art using known techniques. See, e.g., Lloyd (1999) The Art, Science and Technology of Pharmaceutical Compounding. In a specific example, serum levels of at least about 2 μg/mL or at least about 5 μg/mL of the multidomain therapeutic protein are considered therapeutically effective and correspond to complete correction of glycogen storage in muscles.

[0624] Therapeutic or pharmaceutical compositions comprising the compositions disclosed herein can be administered with suitable carriers, excipients, and other agents that are incorporated into formulations to provide improved transfer, delivery, tolerance, and the like. A multitude of appropriate formulations can be found in the formulary known to all pharmaceutical chemists: Remington's Pharmaceutical Sciences, Mack Publishing Company, Easton, PA. See also Powell et al. “Compendium of excipients for parenteral formulations” PDA (1998) J. Pharm. Sci. Technol. 52:238-311. In certain embodiments, the pharmaceutical compositions are non-pyrogenic.

[0625] The compositions disclosed herein may be administered to relieve or prevent or decrease the severity of one or more of the symptoms of ASMD. Such symptoms are described in more detail elsewhere herein.

[0626] The subject in any of the above methods can be one in need of amelioration or treatment of ASMD. The subject in any of the above methods can be from any suitable species, such as a eukaryote or a mammal. A mammal can be, for example, a non-human mammal, a human, a rodent, a rat, a mouse, or a hamster. Other non-human mammals include, for example, non-human primates, e.g., monkeys and apes. The term “non-human” excludes humans. Specific examples of suitable species include, but are not limited to, humans, rodents, mice, rats, and non-human primates. In a specific example, the subject is a human. The subject in some methods can be a neonatal subject. In other methods, the subject is not a neonatal subject.

[0627] In methods in which a multidomain therapeutic protein nucleic acid construct is genomically integrated, any target genomic locus capable of expressing a gene can be used, such as a safe harbor locus (safe harbor gene) or an endogenous SMPD1 locus. Such loci are described in more detail elsewhere herein. In a specific example, the target genomic locus can be an endogenous ALB locus, such as an endogenous human ALB locus. For example, the nucleic acid construct can be genomically integrated in intron 1 of the endogenous ALB locus. Endogenous ALB exon 1 can then splice into the coding sequence for the multidomain therapeutic protein in the nucleic acid construct.

[0628] Targeted insertion of the nucleic acid encoding a multidomain therapeutic protein comprising the multidomain therapeutic protein coding sequence into a target genomic locus, and particularly an endogenous ALB locus, offers multiple advantages. Such methods result in stable modification to allow for stable, long-term expression of the multidomain therapeutic protein coding sequence. With respect to the ALB locus, such methods are able to utilize the endogenous ALB promoter and regulatory regions to achieve therapeutically effective levels of expression. For example, the multidomain therapeutic protein coding sequence in the nucleic acid construct can comprise a promoterless gene, and the inserted nucleic acid can be operably linked to an endogenous promoter in the target genomic locus (e.g., ALB locus). Use of an endogenous promoter is advantageous because it obviates the need for inclusion of a promoter in the nucleic acid construct, allowing packaging of larger transgenes that may not normally package efficiently (e.g., in AAV). Alternatively, the multidomain therapeutic protein coding sequence in the nucleic acid construct can be operably linked to an exogenous promoter in the nucleic acid construct. Examples of types of promoters that can be used are disclosed elsewhere herein.

[0629] Optionally, some or all of the endogenous gene (e.g., endogenous ALB gene) at the target genomic locus can be expressed upon insertion of the multidomain therapeutic protein coding sequence from the nucleic acid construct. Alternatively, in some methods, none of the endogenous gene at the target genomic locus is expressed. As one example, the modified target genomic locus (e.g., modified ALB locus) after integration of the nucleic acid construct can encode a chimeric protein comprising an endogenous secretion signal (e.g., albumin secretion signal) and the multidomain therapeutic protein encoded by the nucleic acid construct. In another example, the first intron of an ALB locus can be targeted. The secretion signal peptide of ALB is encoded by exon 1 of the ALB gene. In such a scenario, a promoterless cassette bearing a splice acceptor and the multidomain therapeutic protein coding sequence will support expression and secretion of the multidomain therapeutic protein. Splicing between endogenous ALB exon 1 and the integrated multidomain therapeutic protein coding sequence creates a chimeric mRNA and protein including the endogenous ALB sequence encoded by exon 1 operably linked to the multidomain therapeutic protein sequence encoded by the integrated nucleic acid construct.

[0630] The nucleic acid encoding a multidomain therapeutic protein can be inserted into the target genomic locus by any means, including homologous recombination (HR) and non-homologous end joining (NHEJ) as described elsewhere herein. In a specific example, the nucleic acid encoding a multidomain therapeutic protein is inserted by NHEJ (e.g., does not comprise a homology arm and is inserted by NHEJ).

[0631] In another specific example, the nucleic acid encoding a multidomain therapeutic protein can be inserted via homology-independent targeted integration (e.g., directional homology-independent targeted integration). For example, the multidomain therapeutic protein coding sequence in the nucleic acid construct can be flanked on each side by a target site for a nuclease agent (e.g., the same target site as in the target genomic locus, and the same nuclease agent being used to cleave the target site in the target genomic locus). The nuclease agent can then cleave the target sites flanking the multidomain therapeutic protein coding sequence. In a specific example, the nucleic acid construct is delivered AAV-mediated delivery, and cleavage of the target sites flanking the multidomain therapeutic protein coding sequence can remove the inverted terminal repeats (ITRs) of the AAV. Removal of the ITRs can make it easier to assess successful targeting, because presence of the ITRs can hamper sequencing efforts due to the repeated sequences. In some methods, the target site in the target genomic locus (e.g., a gRNA target sequence including the flanking protospacer adjacent motif) is no longer present if the multidomain therapeutic protein coding sequence is inserted into the target genomic locus in the correct orientation but it is reformed if the multidomain therapeutic protein coding sequence is inserted into the target genomic locus in the opposite orientation. This can help ensure that the multidomain therapeutic protein coding sequence is inserted in the correct orientation for expression.

[0632] In any of the above methods, the multidomain therapeutic protein nucleic acid construct can be administered simultaneously with the nuclease agent (e.g., CRISPR/Cas system) or not simultaneously (e.g., sequentially in any combination). For example, in a method comprising administering a composition comprising the multidomain therapeutic protein nucleic acid construct and a nuclease agent, they can be administered separately. For example, the multidomain therapeutic protein nucleic acid construct can be administered prior to the nuclease agent, subsequent to the nuclease agent, or at the same time as the nuclease agent. Any suitable methods of administering nucleic acid constructs and nuclease agents to cells can be used, particularly methods of administering to the liver, and examples of such methods are described in more detail elsewhere herein. In methods of treatment or in methods of targeting a cell in vivo in a subject, the nucleic acid encoding a multidomain therapeutic protein can be inserted in particular types of cells in the subject. The method and vehicle for introducing the multidomain therapeutic protein nucleic acid construct and/or the nuclease agent into the subject can affect which types of cells in the subject are targeted. In some methods, for example, the nucleic acid encoding a multidomain therapeutic protein is inserted into a target genomic locus (e.g., an endogenous ALB locus) in liver cells, such as hepatocytes. Methods and vehicles for introducing such constructs and nuclease agents into the subject (including methods and vehicles that target the liver or hepatocytes, such as lipid nanoparticle-mediated delivery and AAV-mediated delivery (e.g., rAAV8-mediated delivery) and intravenous injection), are disclosed in more detail elsewhere herein.

[0633] In methods in which a composition comprising a nucleic acid construct (or vector or LNP) and a nuclease agent is administered (i.e., in methods in which a nucleic acid construct (or vector or LNP) and a nuclease agent are both administered), the nucleic acid construct and the nuclease agent can be administered simultaneously. Alternatively, the nucleic acid construct and the nuclease agent can be administered sequentially in any order. For example, the nucleic acid construct can be administered after the nuclease agent, or the nuclease agent can be administered after the nucleic acid construct. For example, the nuclease agent can be administered about 1 hour to about 48 hours, about 1 hour to about 24 hours, about 1 hour to about 12 hours, about 1 hour to about 6 hours, about 1 hour to about 2 hours, about 2 hours to about 48 hours, about 2 hours to about 24 hours, about 2 hours to about 12 hours, about 2 hours to about 6 hours, about 3 hours to about 48 hours, about 6 hours to about 48 hours, about 12 hours to about 48 hours, or about 24 hours to about 48 hours prior to or subsequent to administration of the nucleic acid construct.

[0634] In one example, the nucleic acid construct is administered about 4 hours, about 8 hours, about 12 hours, about 18 hours, about 1 day, about 2 days, about 3 days, about 4 days, about 5 days, about 6 days, or about 1 week prior to administering the nuclease agent. In another example, the nucleic acid construct is administered at least about 4 hours, at least about 8 hours, at least about 12 hours, at least about 18 hours, at least about 1 day, at least about 2 days, at least about 3 days, at least about 4 days, at least about 5 days, at least about 6 days, or at least about 1 week prior to administering the nuclease agent. In another example, the nucleic acid construct is administered about 4 hours to about 24 hours, about 4 hours to about 12 hours, about 4 hours to about 8 hours, about 8 hours to about 24 hours, about 12 hours to about 24 hours, about 1 day to about 7 days, about 1 day to about 6 days, about 1 day to about 5 days, about 1 day to about 4 days, about 1 day to about 3 days, about 1 day to about 2 days, about 2 days to about 7 days, about 3 days to about 7 days, about 4 days to about 7 days, about 5 days to about 7 days, about 6 days to about 7 days, or about 1 day to about 3 days prior to administering the nuclease agent.

[0635] In one example, the nucleic acid construct is administered about 4 hours, about 8 hours, about 12 hours, about 18 hours, about 1 day, about 2 days, about 3 days, about 4 days, about 5 days, about 6 days, or about 1 week after administering the nuclease agent. In another example, the nucleic acid construct is administered at least about 4 hours, at least about 8 hours, at least about 12 hours, at least about 18 hours, at least about 1 day, at least about 2 days, at least about 3 days, at least about 4 days, at least about 5 days, at least about 6 days, or at least about 1 week after administering the nuclease agent. In another example, the nucleic acid construct is administered about 4 hours to about 24 hours, about 4 hours to about 12 hours, about 4 hours to about 8 hours, about 8 hours to about 24 hours, about 12 hours to about 24 hours, about 1 day to about 7 days, about 1 day to about 6 days, about 1 day to about 5 days, about 1 day to about 4 days, about 1 day to about 3 days, about 1 day to about 2 days, about 2 days to about 7 days, about 3 days to about 7 days, about 4 days to about 7 days, about 5 days to about 7 days, about 6 days to about 7 days, or about 1 day to about 3 days after administering the nuclease agent.

[0636] In any of the above methods, the multidomain therapeutic protein nucleic acid construct and the nuclease agent (e.g., CRISPR/Cas system) can be administered using any suitable delivery system and known method. The nuclease agent components and multidomain therapeutic protein nucleic acid construct (e.g., the guide RNA, Cas protein, and multidomain therapeutic protein nucleic acid construct) can be delivered individually or together in any combination, using the same or different delivery methods as appropriate.

[0637] In methods in which a CRISPR/Cas system is used, a guide RNA can be introduced into or administered to a subject or cell, for example, in the form of an RNA (e.g., in vitro transcribed RNA, such as the modified guide RNAs disclosed herein) or in the form of a DNA encoding the guide RNA. When introduced in the form of a DNA, the DNA encoding a guide RNA can be operably linked to a promoter active in the cell or in a cell in the subject. For example, a guide RNA may be delivered via AAV and expressed in vivo under a U6 promoter. Such DNAs can be in one or more expression constructs. For example, such expression constructs can be components of a single nucleic acid molecule. Alternatively, they can be separated in any combination among two or more nucleic acid molecules (i.e., DNAs encoding one or more CRISPR RNAs and DNAs encoding one or more tracrRNAs can be components of a separate nucleic acid molecules).

[0638] Likewise, Cas proteins can be introduced into a subject or cell in any form. For example, a Cas protein can be provided in the form of a protein, such as a Cas protein complexed with a gRNA. Alternatively, a Cas protein can be provided in the form of a nucleic acid encoding the Cas protein, such as an RNA (e.g., messenger RNA (mRNA)), such as a modified mRNA as disclosed herein, or DNA). Optionally, the nucleic acid encoding the Cas protein can be codon optimized for efficient translation into protein in a particular cell or organism. For example, the nucleic acid encoding the Cas protein can be modified to substitute codons having a higher frequency of usage in a mammalian cell, a human cell, a rodent cell, a mouse cell, a rat cell, or any other host cell of interest, as compared to the naturally occurring polynucleotide sequence. When a nucleic acid encoding the Cas protein is introduced into a cell or a subject, the Cas protein can be transiently, conditionally, or constitutively expressed in the cell or in a cell in the subject.

[0639] In one example, the Cas protein is introduced in the form of an mRNA (e.g., a modified mRNA as disclosed herein), and the guide RNA is introduced in the form of RNA such as a modified gRNA as disclosed herein (e.g., together within the same lipid nanoparticle). Guide RNAs can be modified as disclosed elsewhere herein. Likewise, Cas mRNAs can be modified as disclosed elsewhere herein.

[0640] In methods in which a nucleic acid encoding a multidomain therapeutic protein is inserted following cleavage by a gene-editing system (e.g., a Cas protein), the gene-editing system (e.g., Cas protein) can cleave the target genomic locus to create a single-strand break (nick) or double-strand break, and the cleaved or nicked locus can be repaired by insertion of the multidomain therapeutic protein nucleic acid construct via non-homologous end joining (NHEJ)-mediated insertion or homology-directed repair. Optionally, repair with the multidomain therapeutic protein nucleic acid construct removes or disrupts the guide RNA target sequence(s) so that alleles that have been targeted cannot be re-targeted by the CRISPR/Cas reagents.

[0641] As explained in more detail elsewhere herein, the multidomain therapeutic protein nucleic acid constructs can comprise deoxyribonucleic acid (DNA) or ribonucleic acid (RNA), they can be single-stranded or double-stranded, and they can be in linear or circular form. The multidomain therapeutic protein nucleic acid constructs can be naked nucleic acids or can be delivered by viruses, such as AAV. In a specific example, the multidomain therapeutic protein nucleic acid construct can be delivered via AAV and can be capable of insertion into the target genomic locus (e.g., a safe harbor gene, an ALB gene, or intron 1 of an ALB gene) by non-homologous end joining (e.g., the multidomain therapeutic protein nucleic acid construct can be one that does not comprise a homology arm).

[0642] Some multidomain therapeutic protein nucleic acid constructs are capable of insertion by non-homologous end joining. In some cases, such multidomain therapeutic protein nucleic acid constructs do not comprise a homology arm. For example, such nucleic acids encoding a multidomain therapeutic protein can be inserted into a blunt end double-strand break following cleavage with a Cas protein. In a specific example, the multidomain therapeutic protein nucleic acid construct can be delivered via AAV and can be capable of insertion by non-homologous end joining (e.g., the multidomain therapeutic protein nucleic acid construct can be one that does not comprise a homology arm).

[0643] In another example, the nucleic acid encoding a multidomain therapeutic protein can be inserted via homology-independent targeted integration. For example, the multidomain therapeutic protein nucleic acid construct can be flanked on each side by a guide RNA target sequence (e.g., the same target site as in the target genomic locus, and the CRISPR/Cas reagent (Cas protein and guide RNA) being used to cleave the target site in the target genomic locus). The Cas protein can then cleave the target sites flanking the nucleic acid insert. In a specific example, the multidomain therapeutic protein nucleic acid construct is delivered AAV-mediated delivery, and cleavage of the target sites flanking the nucleic acid insert can remove the inverted terminal repeats (ITRs) of the AAV. In some methods, the target site in the target genomic locus (e.g., a guide RNA target sequence including the flanking protospacer adjacent motif) is no longer present if the nucleic acid insert is inserted into the target genomic locus in the correct orientation but it is reformed if the nucleic acid insert is inserted into the target genomic locus in the opposite orientation.

[0644] The methods disclosed herein can comprise introducing or administering into a subject (e.g., an animal or mammal, such as a human) or cell a multidomain therapeutic protein nucleic acid construct and optionally a nuclease agent such as CRISPR/Cas reagents, including in the form of nucleic acids (e.g., DNA or RNA), proteins, or nucleic-acid-protein complexes. “Introducing” or “administering” includes presenting to the cell or subject the molecule(s) (e.g., nucleic acid(s) or protein(s)) in such a manner that it gains access to the interior of the cell or to the interior of cells within the subject. The introducing can be accomplished by any means, and two or more of the components (e.g., two of the components, or all of the components) can be introduced into the cell or subject simultaneously or sequentially in any combination. For example, a Cas protein can be introduced into a cell or subject before introduction of a guide RNA, or it can be introduced following introduction of the guide RNA. As another example, a multidomain therapeutic protein nucleic acid construct can be introduced prior to the introduction of a Cas protein and a guide RNA, or it can be introduced following introduction of the Cas protein and the guide RNA (e.g., the multidomain therapeutic protein nucleic acid construct can be administered about 1, 2, 3, 4, 8, 12, 24, 36, 48, or 72 hours before or after introduction of the Cas protein and the guide RNA). See, e.g., US 2015/0240263 and US 2015/0110762, each of which is herein incorporated by reference in its entirety for all purposes. In addition, two or more of the components can be introduced into the cell or subject by the same delivery method or different delivery methods. Similarly, two or more of the components can be introduced into a subject by the same route of administration or different routes of administration.

[0645] A guide RNA can be introduced into a subject or cell, for example, in the form of an RNA (e.g., in vitro transcribed RNA) or in the form of a DNA encoding the guide RNA. Guide RNAs can be modified as disclosed elsewhere herein. When introduced in the form of a DNA, the DNA encoding a guide RNA can be operably linked to a promoter active in the cell or in a cell in the subject. For example, a guide RNA may be delivered via AAV and expressed in vivo under a U6 promoter. Such DNAs can be in one or more expression constructs. For example, such expression constructs can be components of a single nucleic acid molecule. Alternatively, they can be separated in any combination among two or more nucleic acid molecules (i.e., DNAs encoding one or more CRISPR RNAs and DNAs encoding one or more tracrRNAs can be components of a separate nucleic acid molecules).

[0646] Likewise, Cas proteins can be provided in any form. For example, a Cas protein can be provided in the form of a protein, such as a Cas protein complexed with a gRNA. Alternatively, a Cas protein can be provided in the form of a nucleic acid encoding the Cas protein, such as an RNA (e.g., messenger RNA (mRNA)) or DNA. Cas RNAs can be modified as disclosed elsewhere herein. Optionally, the nucleic acid encoding the Cas protein can be codon optimized for efficient translation into protein in a particular cell or organism. For example, the nucleic acid encoding the Cas protein can be modified to substitute codons having a higher frequency of usage in a mammalian cell, a human cell, a rodent cell, a mouse cell, a rat cell, or any other host cell of interest, as compared to the naturally occurring polynucleotide sequence. When a nucleic acid encoding the Cas protein is introduced into a cell or a subject, the Cas protein can be transiently, conditionally, or constitutively expressed in the cell or in a cell in the subject.

[0647] Nucleic acids encoding Cas proteins or guide RNAs can be operably linked to a promoter in an expression construct. Expression constructs include any nucleic acid constructs capable of directing expression of a gene or other nucleic acid sequence of interest (e.g., a Cas gene) and which can transfer such a nucleic acid sequence of interest to a target cell. For example, the nucleic acid encoding the Cas protein can be in a vector comprising a DNA encoding one or more gRNAs. Alternatively, it can be in a vector or plasmid that is separate from the vector comprising the DNA encoding one or more gRNAs. Suitable promoters that can be used in an expression construct include promoters active, for example, in one or more of a eukaryotic cell, a human cell, a non-human cell, a mammalian cell, a non-human mammalian cell, a rodent cell, a mouse cell, a rat cell, a hamster cell, a pluripotent cell, an embryonic stem (ES) cell, an adult stem cell, a developmentally restricted progenitor cell, an induced pluripotent stem (iPS) cell, or a one-cell stage embryo. For example, a suitable promoter can be active in a liver cell such as a hepatocyte. Such promoters can be, for example, conditional promoters, inducible promoters, constitutive promoters, or tissue-specific promoters. Optionally, the promoter can be a bidirectional promoter driving expression of both a Cas protein in one direction and a guide RNA in the other direction. Such bidirectional promoters can consist of (1) a complete, conventional, unidirectional Pol III promoter that contains 3 external control elements: a distal sequence element (DSE), a proximal sequence element (PSE), and a TATA box; and (2) a second basic Pol III promoter that includes a PSE and a TATA box fused to the 5′ terminus of the DSE in reverse orientation. For example, in the H1 promoter, the DSE is adjacent to the PSE and the TATA box, and the promoter can be rendered bidirectional by creating a hybrid promoter in which transcription in the reverse direction is controlled by appending a PSE and TATA box derived from the U6 promoter. See, e.g., US 2016/0074535, herein incorporated by references in its entirety for all purposes. Use of a bidirectional promoter to express genes encoding a Cas protein and a guide RNA simultaneously allows for the generation of compact expression cassettes to facilitate delivery. In preferred embodiments, promotors are accepted by regulatory authorities for use in humans. In certain embodiments, promotors drive expression in a liver cell.

[0648] Molecules (e.g., Cas proteins or guide RNAs or nucleic acids encoding) introduced into the subject or cell can be provided in compositions comprising a carrier increasing the stability of the introduced molecules (e.g., prolonging the period under given conditions of storage (e.g., −20° C., 4° C., or ambient temperature) for which degradation products remain below a threshold, such below 0.5% by weight of the starting nucleic acid or protein; or increasing the stability in vivo). Non-limiting examples of such carriers include poly(lactic acid) (PLA) microspheres, poly(D,L-lactic-coglycolic-acid) (PLGA) microspheres, liposomes, micelles, inverse micelles, lipid cochleates, and lipid microtubules.

[0649] Various methods and compositions are provided herein to allow for introduction of molecule (e.g., a nucleic acid or protein) into a cell or subject. Methods for introducing molecules into various cell types are known and include, for example, stable transfection methods, transient transfection methods, and virus-mediated methods.

[0650] Transfection protocols as well as protocols for introducing molecules into cells may vary. Non-limiting transfection methods include chemical-based transfection methods using liposomes; nanoparticles; calcium phosphate (Graham et al. (1973) Virology 52 (2): 456-67, Bacchetti et al. (1977) Proc. Natl. Acad. Sci. U.S.A. 74 (4):1590-4, and Kriegler, M (1991). Transfer and Expression: A Laboratory Manual. New York: W. H. Freeman and Company. pp. 96-97); dendrimers; or cationic polymers such as DEAE-dextran or polyethylenimine. Non-chemical methods include electroporation, sonoporation, and optical transfection. Particle-based transfection includes the use of a gene gun, or magnet-assisted transfection (Bertram (2006) Current Pharmaceutical Biotechnology 7, 277-28). Viral methods can also be used for transfection.

[0651] Introduction of nucleic acids or proteins into a cell can also be mediated by electroporation, by intracytoplasmic injection, by viral infection, by adenovirus, by adeno-associated virus, by lentivirus, by retrovirus, by transfection, by lipid-mediated transfection, or by nucleofection. Nucleofection is an improved electroporation technology that enables nucleic acid substrates to be delivered not only to the cytoplasm but also through the nuclear membrane and into the nucleus. In addition, use of nucleofection in the methods disclosed herein typically requires much fewer cells than regular electroporation (e.g., only about 2 million compared with 7 million by regular electroporation). In one example, nucleofection is performed using the LONZA® NUCLEOFECTOR™ system.

[0652] Introduction of molecules (e.g., nucleic acids or proteins) into a cell (e.g., a zygote) can also be accomplished by microinjection. In zygotes (i.e., one-cell stage embryos), microinjection can be into the maternal and/or paternal pronucleus or into the cytoplasm. If the microinjection is into only one pronucleus, the paternal pronucleus is preferable due to its larger size. Microinjection of an mRNA is preferably into the cytoplasm (e.g., to deliver mRNA directly to the translation machinery), while microinjection of a Cas protein or a polynucleotide encoding a Cas protein or encoding an RNA is preferable into the nucleus/pronucleus. Alternatively, microinjection can be carried out by injection into both the nucleus/pronucleus and the cytoplasm: a needle can first be introduced into the nucleus/pronucleus and a first amount can be injected, and while removing the needle from the one-cell stage embryo a second amount can be injected into the cytoplasm. If a Cas protein is injected into the cytoplasm, the Cas protein preferably comprises a nuclear localization signal to ensure delivery to the nucleus/pronucleus. Methods for carrying out microinjection are well known. See, e.g., Nagy et al. (Nagy A, Gertsenstein M, Vintersten K, Behringer R., 2003, Manipulating the Mouse Embryo. Cold Spring Harbor, New York: Cold Spring Harbor Laboratory Press); see also Meyer et al. (2010) Proc. Natl. Acad. Sci. U.S.A. 107:15022-15026 and Meyer et al. (2012) Proc. Natl. Acad. Sci. U.S.A. 109:9354-9359, each of which is herein incorporated by reference in its entirety for all purposes.

[0653] Other methods for introducing molecules (e.g., nucleic acid or proteins) into a cell or subject can include, for example, vector delivery, particle-mediated delivery, exosome-mediated delivery, lipid-nanoparticle-mediated delivery, cell-penetrating-peptide-mediated delivery, or implantable-device-mediated delivery. As specific examples, a nucleic acid or protein can be introduced into a cell or subject in a carrier such as a poly(lactic acid) (PLA) microsphere, a poly(D,L-lactic-coglycolic-acid) (PLGA) microsphere, a liposome, a micelle, an inverse micelle, a lipid cochleate, or a lipid microtubule. Some specific examples of delivery to a subject include hydrodynamic delivery, virus-mediated delivery (e.g., adeno-associated virus (AAV)-mediated delivery), and lipid-nanoparticle-mediated delivery.

[0654] Introduction of nucleic acids and proteins into cells or subjects can be accomplished by hydrodynamic delivery (HDD). For gene delivery to parenchymal cells, only essential DNA sequences need to be injected via a selected blood vessel, eliminating safety concerns associated with current viral and synthetic vectors. When injected into the bloodstream, DNA is capable of reaching cells in the different tissues accessible to the blood. Hydrodynamic delivery employs the force generated by the rapid injection of a large volume of solution into the incompressible blood in the circulation to overcome the physical barriers of endothelium and cell membranes that prevent large and membrane-impermeable compounds from entering parenchymal cells. In addition to the delivery of DNA, this method is useful for the efficient intracellular delivery of RNA, proteins, and other small compounds in vivo. See, e.g., Bonamassa et al. (2011) Pharm. Res. 28(4):694-701, herein incorporated by reference in its entirety for all purposes.

[0655] Introduction of nucleic acids can also be accomplished by virus-mediated delivery, such as AAV-mediated delivery or lentivirus-mediated delivery. Other exemplary viruses/viral vectors include retroviruses, adenoviruses, vaccinia viruses, poxviruses, and herpes simplex viruses. The viruses can infect dividing cells, non-dividing cells, or both dividing and non-dividing cells. The viruses can integrate into the host genome or alternatively do not integrate into the host genome. Such viruses can also be engineered to have reduced immunity. The viruses can be replication-competent or can be replication-defective (e.g., defective in one or more genes necessary for additional rounds of virion replication and/or packaging). Viruses can cause transient expression or longer-lasting expression. Viral vector may be genetically modified from their wild type counterparts. For example, the viral vector may comprise an insertion, deletion, or substitution of one or more nucleotides to facilitate cloning or such that one or more properties of the vector is changed. Such properties may include packaging capacity, transduction efficiency, immunogenicity, genome integration, replication, transcription, and translation. In some examples, a portion of the viral genome may be deleted such that the virus is capable of packaging exogenous sequences having a larger size. In some examples, the viral vector may have an enhanced transduction efficiency. In some examples, the immune response induced by the virus in a host may be reduced. In some examples, viral genes (such as integrase) that promote integration of the viral sequence into a host genome may be mutated such that the virus becomes non-integrating. In some examples, the viral vector may be replication defective. In some examples, the viral vector may comprise exogenous transcriptional or translational control sequences to drive expression of coding sequences on the vector. In some examples, the virus may be helper-dependent. For example, the virus may need one or more helper virus to supply viral components (such as viral proteins) required to amplify and package the vectors into viral particles. In such a case, one or more helper components, including one or more vectors encoding the viral components, may be introduced into a host cell or population of host cells along with the vector system described herein. In other examples, the virus may be helper-free. For example, the virus may be capable of amplifying and packaging the vectors without a helper virus. In some examples, the vector system described herein may also encode the viral components required for virus amplification and packaging.

[0656] Exemplary viral titers (e.g., AAV titers) include about 10¹² to about 10¹⁶ vg/mL. Other exemplary viral titers (e.g., AAV titers) include about 10¹² to about 10¹⁶ vg/kg of body weight.

[0657] Introduction of nucleic acids and proteins can also be accomplished by lipid nanoparticle (LNP)-mediated delivery. For example, LNP-mediated delivery can be used to deliver a combination of Cas mRNA and guide RNA or a combination of Cas protein and guide RNA. LNP-mediated delivery can be used to deliver a guide RNA in the form of RNA. In a specific example, the guide RNA and the Cas protein are each introduced in the form of RNA via LNP-mediated delivery in the same LNP. As discussed in more detail elsewhere herein, one or more of the RNAs can be modified. For example, guide RNAs can be modified to comprise one or more stabilizing end modifications at the 5′ end and/or the 3′ end. Such modifications can include, for example, one or more phosphorothioate linkages at the 5′ end and/or the 3′ end or one or more 2′—O-methyl modifications at the 5′ end and/or the 3′ end. As another example, Cas mRNA modifications can include substitution with pseudouridine (e.g., fully substituted with pseudouridine), 5′ caps, and polyadenylation. As another example, Cas mRNA modifications can include substitution with N1-methyl-pseudouridine (e.g., fully substituted with N1-methyl-pseudouridine), 5′ caps, and polyadenylation. Other modifications are also contemplated as disclosed elsewhere herein. Delivery through such methods can result in transient Cas expression and/or transient presence of the guide RNA, and the biodegradable lipids improve clearance, improve tolerability, and decrease immunogenicity. Lipid formulations can protect biological molecules from degradation while improving their cellular uptake. Lipid nanoparticles are particles comprising a plurality of lipid molecules physically associated with each other by intermolecular forces. These include microspheres (including unilamellar and multilamellar vesicles, e.g., liposomes), a dispersed phase in an emulsion, micelles, or an internal phase in a suspension. Such lipid nanoparticles can be used to encapsulate one or more nucleic acids or proteins for delivery. Formulations which contain cationic lipids are useful for delivering polyanions such as nucleic acids. Other lipids that can be included are neutral lipids (i.e., uncharged or zwitterionic lipids), anionic lipids, helper lipids that enhance transfection, and stealth lipids that increase the length of time for which nanoparticles can exist in vivo. Examples of suitable cationic lipids, neutral lipids, anionic lipids, helper lipids, and stealth lipids can be found in WO 2016/010840 A1 and WO 2017/173054 A1, each of which is herein incorporated by reference in its entirety for all purposes. An exemplary lipid nanoparticle can comprise a cationic lipid and one or more other components. In one example, the other component can comprise a helper lipid such as cholesterol. In another example, the other components can comprise a helper lipid such as cholesterol and a neutral lipid such as DSPC. In another example, the other components can comprise a helper lipid such as cholesterol, an optional neutral lipid such as DSPC, and a stealth lipid such as S010, S024, S027, S031, or S033.

[0658] The LNP may contain one or more or all of the following: (i) a lipid for encapsulation and for endosomal escape; (ii) a neutral lipid for stabilization; (iii) a helper lipid for stabilization; and (iv) a stealth lipid. See, e.g., Finn et al. (2018) Cell Rep. 22(9):2227-2235 and WO 2017/173054 A1, each of which is herein incorporated by reference in its entirety for all purposes. In certain LNPs, the cargo can include a guide RNA or a nucleic acid encoding a guide RNA. In certain LNPs, the cargo can include an mRNA encoding a Cas nuclease, such as Cas9, and a guide RNA or a nucleic acid encoding a guide RNA. In certain LNPs, the cargo can include a multidomain therapeutic protein nucleic acid construct. In certain LNPs, the cargo can include an mRNA encoding a Cas nuclease, such as Cas9, a guide RNA or a nucleic acid encoding a guide RNA, and a multidomain therapeutic protein nucleic acid construct. LNPs for use in the methods are described in more detail elsewhere herein.

[0659] The mode of delivery can be selected to decrease immunogenicity. For example, a Cas protein and a gRNA may be delivered by different modes (e.g., bi-modal delivery). These different modes may confer different pharmacodynamics or pharmacokinetic properties on the subject delivered molecule (e.g., Cas or nucleic acid encoding, gRNA or nucleic acid encoding, or multidomain therapeutic protein nucleic acid construct). For example, the different modes can result in different tissue distribution, different half-life, or different temporal distribution. Some modes of delivery (e.g., delivery of a nucleic acid vector that persists in a cell by autonomous replication or genomic integration) result in more persistent expression and presence of the molecule, whereas other modes of delivery are transient and less persistent (e.g., delivery of an RNA or a protein). Delivery of Cas proteins in a more transient manner, for example as mRNA or protein, can ensure that the Cas/gRNA complex is only present and active for a short period of time and can reduce immunogenicity caused by peptides from the bacterially-derived Cas enzyme being displayed on the surface of the cell by MHC molecules. Such transient delivery can also reduce the possibility of off-target modifications.

[0660] Administration in vivo can be by any suitable route including, for example, systemic routes of administration such as parenteral administration, e.g., intravenous, subcutaneous, intra-arterial, or intramuscular. In a specific example, administration in vivo is intravenous.

[0661] Compositions comprising the guide RNAs and/or Cas proteins (or nucleic acids encoding the guide RNAs and/or Cas proteins) can be formulated using one or more physiologically and pharmaceutically acceptable carriers, diluents, excipients or auxiliaries. The formulation can depend on the route of administration chosen. Pharmaceutically acceptable means that the carrier, diluent, excipient, or auxiliary is compatible with the other ingredients of the formulation and not substantially deleterious to the recipient thereof. In a specific example, the route of administration and/or formulation or chosen for delivery to the liver (e.g., hepatocytes).

[0662] The methods disclosed herein can increase multidomain therapeutic protein or ASM protein levels and/or multidomain therapeutic protein or ASM activity levels in a cell or subject (e.g., circulating, serum, or plasma levels in a subject) and can comprise measuring multidomain therapeutic protein or ASM protein levels and/or multidomain therapeutic protein or ASM activity levels in a cell or subject (e.g., circulating, serum, or plasma levels in a subject). In one example, the methods result in increased expression of the multidomain therapeutic protein in the subject compared to a method comprising administering an episomal expression vector encoding the multidomain therapeutic protein. For example, the methods can result in increased serum levels of the multidomain therapeutic protein in the subject compared to a method comprising administering an episomal expression vector encoding the multidomain therapeutic protein. The methods can also result in increased multidomain therapeutic protein activity or ASM activity in the subject compared to a method comprising administering an episomal expression vector encoding the multidomain therapeutic protein. Levels of circulating multidomain therapeutic protein or ASM activity can be measured by using well-known methods.

[0663] In some methods, ASM activity and/or expression levels in a subject or in a target tissue (e.g., a target tissue in the central nervous system) are increased to about or at least about 10%, about or at least about 25%, about or at least about 40%, about or at least about 50%, about or at least about 60%, about or at least about 70%, about or at least about 75%, about or at least about 80%, about or at least about 90%, or at least about 100%, or more, of normal level. In some methods, ASM activity and/or expression levels in a subject or in a target tissue (e.g., a target tissue in the central nervous system) are increased to about or at least about 40%, about or at least about 50%, about or at least about 60%, about or at least about 70%, about or at least about 75%, about or at least about 80%, about or at least about 90%, or at least about 100%, or more, of normal level. In certain embodiments, the level of expression or activity is measured in a cell or tissue in which a sign or symptom of the ASM loss of function is present. It is understood that depending on the exogenous protein, the level of activity of the multidomain therapeutic protein may not compare 1:1 with a native ASM protein based on weight. In such embodiment, the relative activity of the multidomain therapeutic protein and the native ASM can be compared. In certain embodiments, the loss of function is nearly complete such that a relative activity cannot be determined. In certain embodiments, the comparison is made to an appropriate control subject. Selection of an appropriate control subject is within the ability of those of skill in the art. In certain embodiments, the level of expression is sufficient to treat at least one sign or symptom resulting from the loss of function of the ASM. ASM activity can be assessed by any known method.

[0664] In some methods, circulating multidomain therapeutic protein levels (i.e., serum levels) are about or at least about 0.5, about or at least about 1, about or at least about 2, about or at least about 3, about or at least about 4, about or at least about 5, about or at least about 6, about or at least about 7, about or at least about 8, about or at least about 9, or about or at least about 10 μg/mL. In some methods, multidomain therapeutic protein levels are at least about 1 μg/mL or about 1 μg/mL. In some methods, multidomain therapeutic protein levels are at least about 2 μg/mL or about 2 μg/mL. In some methods, multidomain therapeutic protein levels are at least about 3 μg/mL or about 3 μg/mL. In some methods, multidomain therapeutic protein levels are at least about 5 μg/mL or about 5 μg/mL. In some methods, multidomain therapeutic protein levels are about 1 μg/mL to about 30 μg/mL, about 2 μg/mL to about 30 μg/mL, about 3 μg/mL to about 30 μg/mL, about 4 μg/mL to about 30 μg/mL, about 5 μg/mL to about 30 μg/mL, about 1 μg/mL to about 20 μg/mL, about 2 μg/mL to about 20 μg/mL, about 3 μg/mL to about 20 μg/mL, about 4 μg/mL to about 20 μg/mL, about 5 μg/mL to about 20 μg/mL. For example, the method can result in multidomain therapeutic protein levels of about 2 μg/mL to about 30 μg/mL or 2 μg/mL to about 20 μg/mL. For example, the method can result in multidomain therapeutic protein levels of about 3 μg/mL to about 30 μg/mL or 3 μg/mL to about 20 μg/mL. For example, the method can result in multidomain therapeutic protein levels of about 5 μg/mL to about 30 μg/mL or 5 μg/mL to about 20 μg/mL. In some embodiments, the recited expression levels are at least 1 month after administration. In some embodiments, the recited expression levels are at least 2 months after administration. In some embodiments, the recited expression levels are at least 3 months after administration. In some embodiments, the recited expression levels are at least 4 months after administration. In some embodiments, the recited expression levels are at least 5 months after administration. In some embodiments, the recited expression levels are at least 6 months after administration. In some embodiments, the recited expression levels are at least 9 months after administration. In some embodiments, the recited expression levels are at least 12 months after administration.

[0665] In some methods, the method increases expression and/or activity of ASM or the multidomain therapeutic protein over the subject's baseline expression and/or activity (i.e., expression and/or activity prior to administration). In some methods, the method increases expression and/or activity of ASM over the subject's baseline expression and/or activity (i.e., expression and/or activity prior to administration. In some methods, ASM activity and/or ASM expression or serum levels in a subject are increased by about or at least about 10%, about or at least about 25%, about or at least about 50%, about or at least about 75%, or about or at least about 100%, or more, as compared to the subject's ASM expression or serum levels and/or activity (e.g., ASM activity) before administration (i.e., the subject's baseline levels). It is understood that depending on the multidomain therapeutic protein, the level of activity of the multidomain therapeutic protein may not compare 1:1 with a native protein based on weight. In such embodiment, the relative activity of the multidomain therapeutic protein and the native ASM can be compared. In certain embodiments, the loss of function is nearly complete such that a relative activity cannot be determined. In certain embodiments, the level of expression is sufficient to treat at least one sign or symptom resulting from the loss of function of the ASM.

[0666] In some methods, the method increases expression and/or activity of the multidomain therapeutic protein over the cell's baseline expression and/or activity (i.e., expression and/or activity prior to administration). In some methods, the method increases expression and/or activity of ASM over the cell's baseline expression and/or activity (i.e., expression and/or activity prior to administration. In some methods, ASM activity and/or expression levels in a cell or population of cells (e.g., liver cells, or hepatocytes) are increased by about or at least about 10%, about or at least about 25%, about or at least about 50%, about or at least about 75%, about or at least about 100%, or more, as compared to the ASM activity and/or expression levels before administration (i.e., the subject's baseline levels). It is understood that depending on the multidomain therapeutic protein, the level of activity of the multidomain therapeutic protein may not compare 1:1 with a native ASM protein based on weight. In such embodiment, the relative activity of the multidomain therapeutic protein and the native ASM protein can be compared. In certain embodiments, the ASM loss of function is nearly complete such that a relative activity cannot be determined. In certain embodiments, the level of expression is sufficient to treat at least one sign or symptom resulting from the loss of function of the ASM.

[0667] In a specific example, the ASM activity levels in a subject or in a target tissue (e.g., a target tissue in the central nervous system) are increased to no more than about 500%, no more than about 400%, no more than about 300%, no more than about 250%, no more than about 200%, or no more than about 150% of normal ASM activity levels.

[0668] In a specific example, the ASM activity levels in the subject or in a target tissue (e.g., a target tissue in the central nervous system) are increased to at least about 1%, at least about 5%, at least about 10%, at least about 15%, at least about 20%, at least about 25%, at least about 30%, at least about 35%, at least about 40%, at least about 45%, at least about 50%, at least about 55%, at least about 60%, at least about 65%, at least about 70%, at least about 75%, at least about 80%, at least about 85%, at least about 90%, or at least about 100% of normal ASM activity levels. In a specific example, the ASM activity levels in the subject or in a target tissue (e.g., a target tissue in the central nervous system) are increased to at least about 40%, at least about 45%, at least about 50%, at least about 55%, at least about 60%, at least about 65%, at least about 70%, at least about 75%, at least about 80%, at least about 85%, at least about 90%, or at least about 100% of normal ASM activity levels.

[0669] In some methods, the method results in increased expression of the multidomain therapeutic protein in the subject (e.g., neonatal subject) compared to a method comprising administering an episomal expression vector encoding the polypeptide of interest in a control subject. In some methods, the method results in increased serum levels of the multidomain therapeutic protein in the subject (e.g., neonatal subject) compared to a method comprising administering an episomal expression vector encoding the polypeptide of interest to a control subject.

[0670] In some methods, the method increases expression or activity of the multidomain therapeutic protein or ASM over the subject's (e.g., neonatal subject's) baseline expression or activity of the multidomain therapeutic protein or ASM (i.e., any percent change in expression that is larger than typical error bars). In some methods, the method results in expression of the multidomain therapeutic protein or ASM at a detectable level above zero, e.g., at a statistically significant level, a clinically relevant level.

[0671] Some methods comprise achieving a durable or sustained effect in a human, such as an at least at least 8 weeks, at least 24 weeks, for example, at least 1 year, or optionally at least 2 year effect, and in some embodiments, at least 3 year, at least 4 year, or at least 5 year effect. Some methods comprise achieving the therapeutic effect in a human in a durable and sustained manner, such as an at least 8 weeks, at least 24 weeks, for example, at least 1 year, or optionally at least 2 year effect, and in some embodiments, at least 3 year, at least 4 year, or at least 5 year effect. In some methods, the increased multidomain therapeutic protein or ASM activity and/or expression level in a human is stable for at least at least 8 weeks, at least 24 weeks, for example, at least 1 year, optionally at least 2 years, and in some embodiments, at least 3 years, at least 4 years, or at least 5 years. In some methods, a steady-state activity and/or level of multidomain therapeutic protein or ASM in a human is achieved by at least 7 days, at least 14 days, or at least 28 days, optionally at least 56 days, at least 80 days, or at least 96 days. In additional methods, the method comprises maintaining multidomain therapeutic protein or ASM activity and/or levels after a single dose in a human for at least 8 weeks, at least 16 weeks, or at least 24 week, or in some embodiments at least 1 year, or at least 2 years, optionally at least 3 years, at least 4 years, or at least 5 years. For example, expression of the multidomain therapeutic protein or ASM can be sustained in the human subject for at least about 8 weeks, at least about 12 weeks, at least about 24 weeks, in certain embodiments, at least about 1 year, or at least about 2 years after treatment, and in some embodiments, at least 3 years, at least 4 years, or at least 5 years after treatment. Likewise, activity of the multidomain therapeutic protein or ASM can be sustained in the human subject for at least about 8 weeks, at least about 12 weeks, at least about 24 weeks, in certain embodiments for at least about 1 year, or at least about 2 years after treatment, and in some embodiments, at least 3 years, at least 4 years, or at least 5 years after treatment. In some methods, expression or activity of the multidomain therapeutic protein or ASM is maintained at a level higher than the expression or activity of the multidomain therapeutic protein or ASM prior to treatment (i.e., the subject's baseline). In some methods, expression or activity of the multidomain therapeutic protein or ASM is considered sustained if it is maintained at a therapeutically effective level of expression or activity. Relative durations, in other organisms, are understood based, e.g., on life span and developmental stages, are covered within the disclosure above. In some methods, expression or activity of the multidomain therapeutic protein or ASM is considered “sustained” if the expression or activity in a human at six months after administration, one year after administration, or two years after administration, the expression or activity is at least 50% of the expression or activity of the peak level of expression or activity measured for that subject. In certain embodiments, at six months, e.g., at 24 weeks to 28 weeks, after administration the expression or activity is at least 50%, 55%, 60%, 65%, 70%, 75% or 80% of the expression or activity of the peak level of expression or activity measured for that subject. In certain embodiments, at one year, i.e., about 12 months, e.g., at 11-13 months, after administration the expression or activity is at least 50%, 55%, 60%, 65%, 70%, 75% or 80% of the expression or activity of the peak level of expression or activity measured for that subject. In certain embodiments, at two years, i.e., about 24 months, e.g., at 23-25 months, after administration the expression or activity is at least 50%, 55%, 60%, 65%, 70%, 75% or 80% of the expression or activity of the peak level of expression or activity measured for that subject. In certain embodiments, at six months after administration the expression or activity is at least 50%, preferably at least 60% of the expression or activity of the peak level of expression or activity measured for that subject. In certain embodiments, at one year after administration the expression or activity is at least 50%, preferably at least 60% of the expression or activity of the peak level of expression or activity measured for that subject. In certain embodiments, at two years after administration the expression or activity is at least 50%, preferably at least 60% of the expression or activity of the peak level of expression or activity measured for that subject. In preferred embodiments, the subject has routine monitoring of expression or activity levels of the polypeptide, e.g., weekly, monthly, particularly early after administration, e.g., within the first six months. Periodic measurements may establish that the effect on expression or activity is sustained at, e.g., 6 months after administration, one year after administration, or two years after administration. In some methods in neonatal subjects, the expression of the multidomain therapeutic protein or ASM is sustained when the neonatal subject becomes an adult. In some methods, the expression of the multidomain therapeutic protein or ASM is sustained for the lifetime of the subject or neonatal subject.

[0672] In some methods, the expression or activity of the multidomain therapeutic protein is at least 50% of the expression or activity of the multidomain therapeutic protein at a peak level of expression measured for the subject at 24 weeks after the administering. In some methods, the expression or activity of the multidomain therapeutic protein is at least 50% of the expression or activity of the multidomain therapeutic protein at a peak level of expression measured for the subject at one year after the administering. In some methods, the expression or activity of the multidomain therapeutic protein is at least 60% of the expression or activity of the multidomain therapeutic protein at a peak level of expression measured for the subject at 24 weeks after the administering. In some methods, the expression or activity of the multidomain therapeutic protein is at least 50% of the expression or activity of the multidomain therapeutic protein at a peak level of expression measured for the subject at two years after the administering. In some methods, the expression or activity of the multidomain therapeutic protein is at least 60% of the expression or activity of the multidomain therapeutic protein at a peak level of expression measured for the subject at 2 years after the administering. In some methods, the expression or activity of the multidomain therapeutic protein is at least 60% of the expression or activity of the multidomain therapeutic protein at a peak level of expression measured for the subject at 24 weeks after the administering.

[0673] In some methods involving insertion into an ALB locus, the subject's circulating albumin levels or cell's albumin levels are normal. Such methods may comprise maintaining the subject's circulating albumin levels or the cell's albumin levels within +5%, +10%, +15%, ±20%, or ±50% of normal circulating albumin levels or normal albumin levels. In some methods, the subject's or cell's albumin levels are unchanged as compared to the albumin levels of untreated individuals by at least week 4, at least week 8, at least week 12, or at least week 20. In some methods, the subject's or cell's albumin levels transiently drop and then return to normal levels. In particular, the methods may comprise detecting no significant alterations in levels of plasma albumin.

[0674] In some methods, the method further comprises assessing preexisting anti-ASM immunity in a subject prior to administering any of the nucleic acid constructs described herein. For example, such methods could comprise assessing immunogenicity using a total antibody (TAb) immune assay or a neutralizing antibody (NAb) assay. In some methods, the subject has not previously been administered recombinant ASM protein.

[0675] In some methods, the method further comprises assessing preexisting anti-AAV (e.g., anti-AAV8) immunity in a subject prior to administering any of the nucleic acid constructs described herein. For example, such methods could comprise assessing immunogenicity using a total antibody (TAb) immune assay or a neutralizing antibody (NAb) assay. See, e.g., Manno et al. (2006) Nat. Med. 12(3):342-347, Kruzik et al. (2019) Mol. Ther. Methods Clin. Dev. 14:126-133, and Weber (2021) Front. Immunol. 12:658399, each of which is herein incorporated by reference in its entirety for all purposes. In some embodiments, TAb assays look for antibodies that bind to the AAV vector, whereas NAb assays assess whether the antibodies that are present stop the AAV vector from transducing target cells. With TAb assays, the drug product or an empty capsid can be used to capture the antibodies; NAb assays can require a reporter vector (e.g., a version of the AAV vector encoding luciferase).

[0676] All patent filings, websites, other publications, accession numbers and the like cited above or below are incorporated by reference in their entirety for all purposes to the same extent as if each individual item were specifically and individually indicated to be so incorporated by reference. If different versions of a sequence are associated with an accession number at different times, the version associated with the accession number at the effective filing date of this application is meant. The effective filing date means the earlier of the actual filing date or filing date of a priority application referring to the accession number if applicable. Likewise, if different versions of a publication, website or the like are published at different times, the version most recently published at the effective filing date of the application is meant unless otherwise indicated. Any feature, step, element, embodiment, or aspect of the invention can be used in combination with any other unless specifically indicated otherwise. Although the present invention has been described in some detail by way of illustration and example for purposes of clarity and understanding, it will be apparent that certain changes and modifications may be practiced within the scope of the appended claims.

### BRIEF DESCRIPTION OF THE SEQUENCES

[0677] The nucleotide and amino acid sequences listed in the accompanying sequence listing are shown using standard letter abbreviations for nucleotide bases, and three-letter code for amino acids. The nucleotide sequences follow the standard convention of beginning at the 5′ end of the sequence and proceeding forward (i.e., from left to right in each line) to the 3′ end. Only one strand of each nucleotide sequence is shown, but the complementary strand is understood to be included by any reference to the displayed strand. When a nucleotide sequence encoding an amino acid sequence is provided, it is understood that codon degenerate variants thereof that encode the same amino acid sequence are also provided. The amino acid sequences follow the standard convention of beginning at the amino terminus of the sequence and proceeding forward (i.e., from left to right in each line) to the carboxy terminus.

TABLE 11
Description of Sequences.

| SEQ ID | | |
|---|---|---|
| NO | Type | Description |
| 1 | RNA | Cas9 mRNA |
| 2 | RNA | Cas9 mRNA CDS |
| 3 | DNA | Cas9 CDS |
| 4 | DNA | Human ALB Intron 1 |
| 5 | DNA | Guide RNA Target Sequence Plus PAM v1 |
| 6 | DNA | Guide RNA Target Sequence Plus PAM v2 |
| 7 | DNA | Guide RNA Target Sequence Plus PAM v3 |
| 8 | Protein | SpCas9 Protein V1 |
| 9 | DNA | SpCas9 DNA V1 |
| 10 | DNA | SpCas9 mRNA (cDNA) |
| 11 | Protein | SpCas9 Protein V2 |
| 12 | RNA | SpCas9 mRNA V2 |
| 13 | Protein | SV40 NLS v1 |
| 14 | Protein | SV40 NLS v2 |
| 15 | Protein | Nucleoplasmin NLS |
| 16 | RNA | crRNA Tail v1 |
| 17 | RNA | crRNA Tail v2 |
| 18 | RNA | TracrRNA v1 |
| 19 | RNA | TracrRNA v2 |
| 20 | RNA | TracrRNA v3 |
| 21 | RNA | gRNA Scaffold v1 |
| 22 | RNA | gRNA Scaffold v2 |
| 23 | RNA | gRNA Scaffold v3 |
| 24 | RNA | gRNA Scaffold v4 |
| 25 | RNA | gRNA Scaffold v5 |
| 26 | RNA | gRNA Scaffold v6 |
| 27 | RNA | gRNA Scaffold v7 |
| 28 | RNA | gRNA Scaffold v8 |
| 29 | RNA | Modified gRNA Scaffold |
| 30-61 | RNA | Human ALB Intron 1 Guide Sequences |
| 62-125 | RNA | Human ALB Intron 1 sgRNA Sequences |
| 126-157 | DNA | Human ALB Intron 1 Guide RNA Target |
| | | Sequences |
| 158 | DNA | ITR 145 |
| 159 | DNA | ITR 141 |
| 160 | DNA | ITR 130 |
| 161 | DNA | SV40 polyA |
| 162 | DNA | bGH polyA |
| 163 | DNA | Mouse Alb exon 2 Splice Acceptor |
| 164 | RNA | Mouse Alb Intron 1 Guide Sequence g666 |
| 165 | DNA | Mouse Alb Intron 1 Guide RNA Target Sequence |
| | | g666 |
| 166-167 | RNA | Mouse Alb Intron 1 sgRNA Sequences g666 |
| 168 | DNA | ITR 145 Reverse Complement |
| 169 | DNA | SV40 polyA v2 |
| 170-491 | DNA & | Domains in Anti-hTfR Antibodies, Antigen- |
| | Protein | Binding Fragments or scFv Molecules |
| 492-523 | Protein | Anti-hTfR scFvs |
| 524 | DNA | 12799 GA 0 anti-TfR scFv |
| 525 | DNA | 12799 GS 0 anti-TfR scFv |
| 526 | DNA | 12799 GS 0v2 anti-TfR scFv |
| 527 | DNA | 12843 GA 0 anti-TfR scFv |
| 528 | DNA | 12843 GS 0 anti-TfR scFv |
| 529 | DNA | 12843 GS 0v2 anti-TfR scFv |
| 530 | DNA | 12847 GA 0 anti-TfR scFv |
| 531 | DNA | 12847 GS 0 anti-TfR scFv |
| 532 | DNA | 12847 GS 0v2 anti-TfR scFv |
| 533 | DNA | 12799 anti-TfR scFv |
| 534 | DNA | 12839 anti-TfR scFv |
| 535 | DNA | 12843 anti-TfR scFv |
| 536 | DNA | 12847 anti-TfR scFv |
| 537 | Protein | Linker |
| 538 | Protein | Kappa Constant Light Domain |
| 539 | Protein | IgG1 CH1 Heavy Domain |
| 540-609 | Protein | Fab Heavy and Light Chains |
| 610 | Protein | Mus musculus Ror1 Signal Peptide |
| 611 | Protein | IgG4 CH1 Heavy Domain |
| 612 | Protein | Optional N-Terminal Sequence |
| 613 | DNA | ITR 141 Reverse Complement |
| 614 | DNA | ITR 130 Reverse Complement |
| 615 | DNA | SV40 polyA V3 |
| 616 | Protein | 3X G4S Linker |
| 617 | Protein | 2X G4S Linker |
| 618-622 | DNA | 3X G4S Linker Coding Sequences |
| 623-629 | DNA | 2X G4S Linker Coding Sequences |
| 630 | DNA | 1X G4S Linker Coding Sequence |
| 631-638 | Protein | Additional Anti-hTfR Antibody Sequences |
| 639-641 | Protein | Sequences from Examples |
| 642-643 | DNA | Sequences from Examples |
| 644-647 | Protein | Sequences from Examples |
| 648-679 | DNA | Sequences from Examples |
| 680-703 | Protein | Additional Anti-hTfR Antibody Sequences |
| 704-723 | Protein | TfR Epitopes |
| 724 | DNA | CMV Promoter |
| 725 | DNA | ApoE Enhancer + Human AAT Promoter + HBB2 |
| | | Intron |
| 726 | DNA | Mouse SerpinAl Enhancer + Mouse TTR Promoter |
| 727 | DNA | mROR signal peptide CDS |
| 728 | Protein | Human ASM (UniProt P17405; NP_000534.3) |
| 729 | DNA | Human ASM cDNA (NM_000543.5) |
| 730 | DNA | Human ASM CDS (CCDS44531.1) |
| 731 | Protein | Mature Human ASM(47-631) |
| 732 | DNA | Human ASM(62-631) CDS |
| 733 | Protein | Human ASM(62-631) |
| 734 | DNA | Mature Human ASM(47-631) CDS v1 |
| 735 | DNA | Mature Human ASM(47-631) CDS v2 |
| 736 | DNA | 12847scFv:ASM CDS |
| 737 | Protein | 12847scFv:ASM |
| 738 | DNA | ASM:12847scFv CDS |
| 739 | Protein | ASM:12847scFv |
| 740-751 | DNA | Multidomain Therapeutic Protein Constructs |
| 752-762 | Protein | TfR Epitopes |
| 763 | Protein | Heavy Chain Constant Domain |
| 764-795 | Protein | HC Full hIgG1 Sequences |
| 796 | Protein | IgG1 Heavy Chain Constant Domain |
| 797 | DNA | BGH PolyA V2 |
| 798 | DNA | Unidirectional SV40 Late PolyA |
| 799 | DNA | Synthetic PolyA |
| 800 | DNA | Combined BGH Poly A and Unidirectional SV40 |
| | | Late PolyA |
| 801 | DNA | Stuffer |
| 802 | DNA | MAZ Element |
| 803 | DNA | 3xG4S Linker Coding Sequence |
| 804 | DNA | 1xG4S Linker Coding Sequence |
| 805 | DNA | hAlb signal peptide CDS |
| 806 | DNA | hAlb exon 1 first 8 amino acids |
| 807 | DNA | 2XH4 Linker CDS |
| 808 | Protein | 2XH4 Linker |
| 809 | DNA | 1X G4S Linker CDS |
| 810 | DNA | 8D3 mTfR scfv CDS |
| 811 | Protein | 8D3 mTfR scfv |
| 812 | DNA | 12847 hTfR scfv Vh-Vk CDS |
| 813 | Protein | 12847 hTfR scfv Vh-Vk |
| 814 | DNA | 12847 hTfR Fab heavy-light CDS |
| 815 | Protein | 12847 hTfR Fab heavy-light |
| 816 | DNA | 12847 hTfR Fab light-heavy CDS |
| 817 | Protein | 12847 hTfR Fab light-heavy |
| 818 | DNA | Untargeted ASM (hAlb-ASM) |
| 819 | DNA | Untargeted ASM (mROR-ASM) |
| 820 | DNA | hTfR-Fab-HeavyLight:2xG4S:ASM |
| 821 | DNA | hTfR-Fab-LightHeavy:2xG4S:ASM |
| 822 | DNA | hTfRscfv:2xG4S:ASM |
| 823 | DNA | hTfRscfv:2xH4: ASM |
| 824 | DNA | hTfRscfv:3xG4S:ASM |
| 825 | DNA | ASM:2XG4S:Fab-HeavyLight |
| 826 | DNA | ASM:2XG4S:Fab-LightHeavy |
| 827 | DNA | ASM:2XG4S:hTfRscfv |
| 828 | DNA | ASM:1XG4S:mTfRscfv 8D3 |
| 829 | DNA | ASM:2XH4:hTfRscfv |
| 830 | DNA | ASM:3XG4S:hTfRscfv |
| 831 | DNA | hTfRscfv-VhVk:2xG4S:ASM |
| 832 | DNA | hTfR-Fab-HeavyLight:2xG4S:ASM CDS (no Alb) |
| 833 | Protein | hTfR-Fab-HeavyLight:2xG4S:ASM (no Alb) |
| 834 | DNA | hTfR-Fab-LightHeavy:2xG4S:ASM CDS (no Alb) |
| 835 | Protein | hTfR-Fab-LightHeavy:2xG4S:ASM (no Alb) |
| 836 | DNA | hTfRscfv:2xG4S:ASM CDS (no Alb) |
| 837 | Protein | hTfRscfv:2xG4S:ASM (no Alb) |
| 838 | DNA | hTfRscfv:2xH4:ASM CDS (no Alb) |
| 839 | Protein | hTfRscfv:2xH4:ASM (no Alb) |
| 840 | DNA | hTfRscfv:3xG4S:ASM CDS (no Alb) |
| 841 | Protein | hTfRscfv:3xG4S:ASM (no Alb) |
| 842 | DNA | ASM:2XG4S:Fab-HeavyLight CDS (no Alb) |
| 843 | Protein | ASM:2XG4S:Fab-HeavyLight (no Alb) |
| 844 | DNA | ASM:2XG4S:Fab-LightHeavy CDS (no Alb) |
| 845 | Protein | ASM:2XG4S:Fab-LightHeavy (no Alb) |
| 846 | DNA | ASM:2XG4S:hTfRscfv CDS (no Alb) |
| 847 | Protein | ASM:2XG4S:hTfRscfv (no Alb) |
| 848 | DNA | ASM:1XG4S:mTfRscfv 8D3 CDS (no Alb) |
| 849 | Protein | ASM:1XG4S:mTfRscfv 8D3 (no Alb) |
| 850 | DNA | ASM:2XH4:hTfRscfv CDS (no Alb) |
| 851 | Protein | ASM:2XH4:hTfRscfv (no Alb) |
| 852 | DNA | ASM:3XG4S:hTfRscfv CDS (no Alb) |
| 853 | Protein | ASM:3XG4S:hTfRscfv (no Alb) |
| 854 | DNA | hTfRscfv-VhVk:2xG4S:ASM CDS (no Alb) |
| 855 | Protein | hTfRscfv-VhVk:2xG4S:ASM (no Alb) |
| 856 | DNA | Untargeted mROR-ASM |
| 857 | DNA | mROR:ASM:1xG4S:12847scFv |

### EXAMPLES

### Example 1. Generation, Selection and Characterization of Immunoglobulin Molecules

[0678] Anti-human transferrin receptor (hTfR) antibodies were generated and screened for the ability to bind hTfR and for lack of strong blocking of human transferrin-hTfR binding.

[0679] Anti-hTfR Generation. VelocImmune mice were immunized with a recombinant protein comprising human transferrin receptor extracellular domain fused at N-terminus to a 6-His tag (referred to as human 6×His-TfR) as immunogen via subcutaneous footpad injection with Alum:CpG adjuvant. Mice bleeds were collected prior to the initial immunization injection and post-boost injections, and the immune sera were subjected to antibody titer determination using a human TfR specific enzyme-linked immunosorbent assay (ELISA). In this assay serum samples in serial dilutions were added to the immunogen coated plates and plate-bound mouse IgG were detected using an HRP-conjugated anti-mouse IgG antibody. Titer of a tested serum sample is defined as the extrapolated dilution factor of the sample that produces a binding signal two times of the signal of the buffer alone control sample. The mice with optimal anti-TfR antibody titers were selected and subjected to a final boost 3-5 days prior to euthanasia and splenocytes from these mice were harvested and subject to antibody isolation using B cell sorting technology (BST).

[0680] TfR specific antibodies of isolated antibodies were isolated and characterized. Two hundred and fourteen TfR-binding antibodies were cloned into single chain fragment variables (scFvs) in complementary orientations with either the variable heavy chain followed by the variable light chain (V_{H}-V_{K}), or the variable light chain followed by the variable heavy chain (V_{K}-V_{H}), and as fragment antigen-binding regions (Fabs). Conditioned media of CHO cell culture containing the scFvs or Fabs were tested for the ability to bind hTfR proteins and hTfR-expressing cells.

### Example 2. Binding Kinetics of 32 Anti-hTfR Primary Supernatants from CHO

[0681] Biacore binding kinetics assays were conducted for the interaction of 32 anti-human TfR IgG1 monoclonal antibodies from CHO supernatants with TfR reagents at 25° C.

TABLE 12
Monoclonal Antibody Clones Tested

| mAb# | AbID# | Source |
|---|---|---|
| 1 | 12795B | primary supernatant |
| 2 | 12798B | primary supernatant |
| 3 | 12799B | primary supernatant |
| 4 | 12801B | primary supernatant |
| 5 | 12802B | primary supernatant |
| 6 | 12808B | primary supernatant |
| 7 | 12812B | primary supernatant |
| 8 | 12834B | primary supernatant |
| 9 | 12835B | primary supernatant |
| 10 | 12839B | primary supernatant |
| 11 | 12841B | primary supernatant |
| 12 | 12843B | primary supernatant |
| 13 | 12844B | primary supernatant |
| 14 | 12845B | primary supernatant |
| 15 | 12847B | primary supernatant |
| 16 | 12848B | primary supernatant |
| 17 | 12850B | primary supernatant |
| 18 | 31863B | primary supernatant |
| 19 | 31874B | primary supernatant |
| 20 | 12816B | primary supernatant |
| 21 | 12833B | primary supernatant |
| 22 | 69261 | primary supernatant |
| 23 | 69263 | primary supernatant |
| 24 | 69305 | primary supernatant |
| 25 | 69307 | primary supernatant |
| 26 | 69323 | primary supernatant |
| 27 | 69326 | primary supernatant |
| 28 | 69329 | primary supernatant |
| 29 | 69331 | primary supernatant |
| 30 | 69332 | primary supernatant |
| 31 | 69340 | primary supernatant |
| 32 | 69348 | primary supernatant |
| 33 | REGN1945 | |

[0682] Reagents used:
[0683] REGN2431 (hmm.hTfRC; 79210 g/mol molecular weight), having the amino acid sequence:

(SEQ ID NO: 639)
HHHHHHEQKLISEEDLGGEQKLISEEDLCKGVEPKTECERLAGTESPVRES
EPGEDFPAARRLYWDDLKRKLSEKLDTDFTGTIKLLNENSYVPREAGSQKD
ENLALYVENQFREFKLSKVWRDQHFVKIQVKDSAQNSVIIVDKNGRLVYLV
ENPGGYVAYSKAATVTGKLVHANFGTKKDFEDLYTPVNGSIVIVRAGKITF
AEKVANAESLNAIGVLIYMDQTKFPIVNAELSFFGHAHLGTGDPYTPGFPS
FNHTQFPPSRSSGLPNIPVQTISRAAAEKLFGNMEGDCPSDWKTDSTCRMV
TSESKNVKLTVSNVLKEIKILNIFGVIKGFVEPDHYVVVGAQRDAWGPGAA
KSGVGTALLLKLAQMFSDMVLKDGFQPSRSIIFASWSAGDFGSVGATEWLE
GYLSSLHLKAFTYINLDKAVLGTSNFKVSASPLLYTLIEKTMQNVKHPVTG
QFLYQDSNWASKVEKLTLDNAAFPFLAYSGIPAVSFCFCEDTDYPYLGTTM
DTYKELIERIPELNKVARAAAEVAGQFVIKLTHDVELNLDYERYNSQLLSF
VRDLNQYRADIKEMGLSLQWLYSARGDFFRATSRLTTDFGNAEKTDRFVMK
KLNDRVMRVEYHFLSPYVSPKESPFRHVFWGSGSHTLPALLENLKLRKQNN
GAFNETLFRNQLALATWTIQGAANALSGDVWDIDNEF.

[0684] REGN2054 (mf TFRC ecto-mmh; 78500 g/mol molecular weight): monomeric monkey (cyno) Tfrc ectodomain (amino acids C89-F760, Accession #:XP_045243212.1) with a c-terminal myc-myc-hexahistidine tag containing a GG linker (underlined) between the 2 myc epitope sequences

(EQKLISEEDLGGEQKLISEEDLHHHHHH (SEQ ID NO: 640)).

[0685] Equilibrium dissociation constants (K_{D}) for the interaction of anti-TfR monoclonal antibodies with human and fascicularis monkey TfR ecto domain recombinant proteins were determined using a real-time surface plasmon resonance (SPR) based Biacore S200 biosensor. All binding studies were performed in 10 mM HEPES, 150 mM NaCl, 3 mM EDTA, and 0.05% v/v surfactant Tween-20, pH 7.4 (HBS-EP) running buffer at 37° C. The Biacore CM5 sensor surface was first derivatized by amine coupling with a monoclonal mouse anti-human Fc antibody (REGN2567) followed by a step to capture anti-TfR monoclonal antibodies in CHO conditioned media. Human TfR extracellular domain expressed with a C-terminal myc-myc-hexahistidine tag (hTFR-mmh; REGN2431) or monkey TfR extracellular domain expressed with a C-terminal myc-myc-hexahistidine tag (mfTFR-mmh; REGN2054) at concentrations of 100 nM in HBS-EP running buffer were injected at a flow rate of 50 μL/min for 2 minutes. The dissociation of TfR bound to anti-TfR monoclonal antibodies was monitored for 3 minutes in HBS-EP running buffer. At the end of each cycle, the anti-TfR monoclonal antibodies capture surface was regenerated using a 12-sec injection of 20 mM H₃PO₄. The association rate (ka) and dissociation rate (kd) were determined by fitting the real-time binding sensorgrams to a 1:1 binding model with mass transport limitation using Scrubber 2.0 c software. The dissociation equilibrium constant (K_{D}) and dissociative half-life (t½) were calculated from the kinetic rate constants as:

$${K}_{D} ( M ) = \frac{kd}{ka} ,$$

$$and$$

$${t}^{1} {/}_{2} ( min ) = \frac{ln ( 2 )}{60 * kd}$$

[0686] The equilibrium binding constant and the kinetic binding constants are summarized in Table 13 and Table 14 for human TfR and monkey TfR, respectively. At 25° C., anti-TfR monoclonal antibodies bound to hTfR-mmh with K_{D} values ranging from 65.6 pM to 41 nM, as shown in Table 13. Anti-TFR monoclonal antibodies bound to mfTFR-mmh with K_{D} values ranging from 1.16 nM to 20.5 nM, as shown in Table 14.

[0687] Results are set forth below.

TABLE 13
Equilibrium and kinetic binding parameters for the interaction of hTFR-
mmh with anti-TfR monoclonal antibodies (bivalent IgG) at 25° C.

| | mAb | | | | | |
|---|---|---|---|---|---|---|
| | Capture | 100 nM Ag | | | | |
| | Level | Bound | kₐ | kₐ | K_{D} | t½ |
| Molecule | (RU) | (RU) | (1/Ms) | (1/s) | (M) | (min) |
| 12795B | 3344 | 883 | 1.22E+05 | <1.00E−05 | 8.23E−11 | >1155^{#} |
| 12798B | 4552 | 1151 | 1.63E+05 | 6.33E−05 | 3.87E−10 | 182.6 |
| 12799B | 2388 | 699 | 7.76E+04 | 6.62E−05 | 8.51E−10 | 174.5 |
| 12801B | 4720 | 598 | 8.19E+04 | 4.19E−05 | 5.13E−10 | 276.0 |
| 12802B | 2828 | 903 | 1.23E+05 | 2.92E−05 | 2.36E−10 | 395.4 |
| 12808B | 4336 | 964 | 1.19E+05 | 1.07E−04 | 8.94E−10 | 108.5 |
| 12812B | 2222 | 11 | 4.33E+05 | 1.31E−03 | 3.02E−09 | 8.8 |
| 12834B | 3837 | 11 | 6.00E+05 | 4.39E−03 | 7.00E−09 | 2.6 |
| 12835B | 3276 | 1146 | 1.34E+05 | 4.17E−04 | 3.11E−09 | 27.7 |
| 12839B | 5192 | 660 | 1.18E+05 | 5.33E−05 | 4.48E−10 | 216.9 |
| 12841B | 2895 | 1151 | 1.73E+05 | 1.16E−04 | 6.70E−10 | 99.8 |
| 12843B | 3080 | 854 | 9.42E+04 | 1.68E−04 | 1.78E−09 | 68.8 |
| 12844B | 2869 | 946 | 1.31E+05 | 1.22E−04 | 9.35E−10 | 95.0 |
| 12845B | 2911 | 1104 | 1.68E+05 | 1.99E−04 | 1.18E−09 | 57.9 |
| 12847B | 4425 | 895 | 1.05E+05 | 1.71E−04 | 1.62E−09 | 67.6 |
| 12848B | 4530 | 823 | 1.01E+05 | 4.99E−05 | 4.94E−10 | 231.6 |
| 12850B | 2990 | 725 | 8.37E+04 | 1.76E−05 | 2.15E−10 | 656.8 |
| 31863B | 5490 | 1083 | 1.52E+05 | <1.00E−05 | 6.56E−11 | >1155^{#} |
| 31874B | 5594 | 904 | 1.38E+05 | 1.15E−04 | 8.36E−10 | 100.5 |
| 12816B | 3377 | 357 | 5.79E+04 | 3.36E−04 | 5.80E−09 | 34.3 |
| 12833B | 3972 | 409 | 7.20E+04 | 2.52E−04 | 3.51E−09 | 45.9 |
| 69261 | 3546 | 462 | 7.00E+04 | 8.08E−05 | 1.16E−09 | 142.9 |
| 69263 | 180 | 150 | 1.77E+05 | 1.15E−03 | 6.50E−09 | 10.0 |
| 69305 | 2726 | 6 | NB* | NB* | NB* | NB* |
| 69307 | 2349 | 1285 | 1.90E+05 | 4.26E−05 | 2.26E−10 | 271.1 |
| 69323 | 4506 | 465 | 7.34E+04 | 1.80E−04 | 2.45E−09 | 64.1 |
| 69326 | 1709 | 680 | 1.15E+05 | 2.56E−04 | 2.22E−09 | 45.1 |
| 69329 | 1573 | 1100 | 1.92E+05 | 1.86E−04 | 9.70E−10 | 62.2 |
| 69331 | 4617 | 87 | 1.14E+05 | 4.66E−03 | 4.10E−08 | 2.5 |
| 69332 | 3915 | 9 | NB* | NB* | NB* | NB* |
| 69340 | 3226 | 999 | 1.44E+05 | 6.23E−05 | 4.29E−10 | 185.4 |
| 69348 | 2848 | 680 | 1.06E+05 | 1.72E−04 | 1.62E−09 | 67.2 |
| REGN1945 | 4011 | 6 | NB | NB | NB | NB |

^{#}indicates no dissociation was observed under the current experimental conditions and the kd value was manually fixed at 1.00E−05 s⁻¹ while fitting the real time binding sensorgrams.
*NB indicates that no binding was observed under the current experimental conditions.

TABLE 14
Equilibrium and kinetic binding parameters for the interaction of mfTfR-
mmh with anti-TfR monoclonal antibodies (bivalent IgG) at 25° C.

| | mAb | | | | | |
|---|---|---|---|---|---|---|
| | Capture | 100 nM Ag | | | | |
| | Level | Bound | kₐ | k_{d} | K_{D} | t½ |
| Molecule | (RU) | (RU) | (1/Ms) | (1/s) | (M) | (min) |
| 12795B | 3334 | 364 | 6.10E+04 | 7.13E−05 | 1.16E−09 | 162.0 |
| 12798B | 4542 | 508 | 7.90E+04 | 1.29E−03 | 1.63E−08 | 9.0 |
| 12799B | 2384 | 651 | 8.64E+04 | 1.62E−04 | 1.88E−09 | 71.2 |
| 12801B | 4684 | 159 | 6.40E+04 | 6.53E−04 | 1.02E−08 | 17.7 |
| 12802B | 2819 | 464 | 7.05E+04 | 5.29E−04 | 7.51E−09 | 21.8 |
| 12808B | 4329 | 626 | 7.85E+04 | 4.54E−04 | 5.78E−09 | 25.5 |
| 12812B | 2220 | 1 | NB* | NB* | NB* | NB* |
| 12834B | 3820 | 5 | NB* | NB* | NB* | NB* |
| 12835B | 3262 | 254 | 9.51E+04 | 1.68E−03 | 1.77E−08 | 6.9 |
| 12839B | 5170 | 11 | NB* | NB* | NB* | NB* |
| 12841B | 2888 | 4 | NB* | NB* | NB* | NB* |
| 12843B | 3072 | 399 | 7.90E+04 | 1.18E−03 | 1.50E−08 | 9.8 |
| 12844B | 2857 | 437 | 7.59E+04 | 7.35E−04 | 9.68E−09 | 15.7 |
| 12845B | 2906 | 13 | NB* | NB* | NB* | NB* |
| 12847B | 4420 | 702 | 9.92E+04 | 3.33E−04 | 3.36E−09 | 34.7 |
| 12848B | 4524 | 261 | 5.29E+04 | 9.62E−04 | 1.82E−08 | 12.0 |
| 12850B | 2985 | 87 | 1.01E+05 | 1.57E−03 | 1.55E−08 | 7.3 |
| 31863B | 5480 | 145 | 1.63E+05 | 2.98E−03 | 1.83E−08 | 3.9 |
| 31874B | 5557 | 26 | 6.91E+05 | 9.96E−03 | 1.44E−08 | 1.2 |
| 12816B | 3376 | 315 | 6.52E+04 | 4.85E−04 | 7.44E−09 | 23.8 |
| 12833B | 3966 | 346 | 6.92E+04 | 4.86E−04 | 7.02E−09 | 23.8 |
| 69261 | 3537 | 331 | 6.83E+04 | 4.03E−04 | 5.90E−09 | 28.7 |
| 69263 | 181 | 77 | 1.97E+05 | 3.78E−03 | 1.92E−08 | 3.1 |
| 69305 | 2725 | −7 | NB* | NB* | NB* | NB* |
| 69307 | 2344 | 3 | NB* | NB* | NB* | NB* |
| 69323 | 4500 | 24 | 5.58E+05 | 1.06E−02 | 1.90E−08 | 1.1 |
| 69326 | 1707 | 9 | NB* | NB* | NB* | NB* |
| 69329 | 1571 | 8 | NB* | NB* | NB* | NB* |
| 69331 | 4611 | 26 | 4.89E+05 | 1.00E−02 | 2.05E−08 | 1.2 |
| 69332 | 3897 | 1 | NB* | NB* | NB* | NB* |
| 69340 | 3219 | 634 | 8.92E+04 | 7.23E−04 | 8.11E−09 | 16.0 |
| 69348 | 2851 | 433 | 9.60E+04 | 4.61E−04 | 4.80E−09 | 25.1 |
| REGN1945 | 4009 | 4 | NB | NB | NB | NB |

*NB indicates that no binding was observed under the current experimental conditions.

### Example 3. Anti-TfR Antibodies Blocking Human TfRC Monomer Binding to Human Holo-Transferrin by ELISA

[0688] An ELISA-based blocking assay was developed to determine the ability of anti-Transferrin Receptor (TfR) antibodies to block the binding of human Transferrin Receptor to human holo-transferrin ligand.

TABLE 15
Reagents

| Reagent | Source |
|---|---|
| Human Transferrin polyclonal goat IgG antibody | R&D Systems |
| Human Holo-Transferrin protein | R&D Systems |
| His-myc-myc-hTFRC ecto | Regeneron |
| HRP conjugated c-Myc polyclonal rabbit IgG | Novus |
| antibody | Biologicals |
| 1X PBS | Irvine Scientific |
| 1X PBST (0.05% tween-20 in PBS) | Sigma |
| BSA: albumin solution from bovine serum, 30% | Sigma |
| 3-3′, 5-5′-tetramethylbenzidine (TMB) Substrate A | BD Biosciences |
| 3-3′, 5-5′-tetramethylbenzidine (TMB) Substrate B | BD Biosciences |
| 2N Sulfuric Acid | VWR |
| Reacti-Bind 96-well plates corner notch | ThermoFisher |
| | Scientific |
| VWR 96-Well Deep Well Plates 0.5 ML | VWR |
| Aquamax Plate Washer 2000 | Molecular Devices |
| VICTOR ™ X4 Multilabel Plate Reader | PerkinElmer |

[0689] The human Transferrin Receptor recombinant protein, hTFRC, used in the experiment was comprised of hTfR extracellular domain (amino acids C89-F760) expressed with an N-terminal 6-Histidine-myc-myc tag (Hmm.hTfrc (REGN2431): Monomeric human Tfrc ectodomain (amino acids C89-F760, Accession #: NP_001121620.1) with an N-terminal hexahistidine-myc-myc-tag containing a GG linker (underlined) between the 2 myc epitope sequences (HHHHHHEQKLISEEDLGGEQKLISEEDL) (amino acids 1-28 of SEQ ID NO: 641)). The human holo-transferrin ligand protein (holo-Tf) isolated from human plasma was purchased from R&D Systems.

[0690] In the blocking assay, the anti-human Transferrin goat IgG polyclonal antibody (anti-hTf pAb) was passively absorbed at a concentration of 2 micrograms/mL in PBS on a 96-well microtiter plate overnight at 4° C. Nonspecific binding sites were subsequently blocked using a 0.5% (w/v) solution of BSA in PBS for 1 hour at room temperature. To the same plate, human holo-Tf was then added at a concentration of 1 micrograms/mL in PBS+0.5% BSA for 2 hours at room temperature. In a separate set of 96-well microtiter plates, solutions of 300 pM Hmm-hTFRC were mixed with TFRC antibody supernatants at 2-fold dilution. After a 1-hour incubation, the mixtures were transferred to the human holo-Tf microtiter plates. After another hour incubation at room temperature, plates were washed, and plate-bound Hmm-hTFRC was detected with horseradish peroxidase (HRP) conjugated rabbit anti-Myc polyclonal antibody. The plates were developed using TMB substrate solution according to the manufacturer's recommended procedure and absorbance at 450 nm was measured on a Victor™ Multilabel Plate Reader.

[0691] Percent blocking for the tested anti-TfR antibodies was calculated using the formula below:

$$\% Blocking = \text{} 100 - [ \frac{\begin{matrix}( Test antibody - Buffer alone \\ without Hmm - hTFRC )\end{matrix}}{\begin{matrix}( Hmm - hTFRC alone - Buffer \\ alone without Hmm - hTFRC )\end{matrix}} ] \times 100$$

[0692] Antibodies that blocked binding of Hmm-hTFRC to human holo-Tf equal or more than 50% were classified as blockers.

[0693] The ability of the anti-TfR antibody to block human TFRC binding to human holo-Tf was evaluated using an ELISA-based blocking assay. In this assay, a fixed concentration of Hmm-hTFRC was pre-incubated with anti-TfR antibody containing supernatant before binding to plate immobilized human holo-Tf protein, and the plate-bound Hmm-hTFRC was detected with HRP-conjugated c-Myc specific rabbit polyclonal antibodies.

[0694] Thirty-two anti-TfR antibodies cloned into single chain fragment variables (scFvs) in complementary orientations with either the variable heavy chain followed by the variable light chain (V_{H}-VK), or the variable light chain followed by the variable heavy chain (V_{K}-V_{H}) and also as fragment antigen-binding regions (Fabs). All ninety-six anti-TfR antibody supernatants were tested for the ability to block human TFRC binding to human holo-Tf. Ninety-four anti-TfR antibody supernatants showed no or low blocking activity with percentage blocking ranging from 0% to 45%, and these antibodies (Fabs or scFvs formats) were classified as non-blockers (Table 16). Only two Fab supernatants had blocking activity greater than 50%, with % blocking values of 64% and 78% respectively.

TABLE 16
Summary of Anti-TfR scFv and Fab Supernatants Ability to Block
Human TFRC binding to Immobilized Human Holo-Tf

| | Blocking of Hmm-hTFRC Binding to Human | | |
|---|---|---|---|
| | Holo-Tf, % Blocking | | |
| | Fab | scFv | scFv |
| AbPID | Format | (V_{K}-V_{H}) Format | (V_{H}-V_{K}) Format |
| 12795B | 44 | 23 | 45 |
| 12798B | 10 | 10 | 0 |
| 12799B | 5 | 10 | 26 |
| 12801B | 45 | 27 | 37 |
| 12802B | 15 | 17 | 11 |
| 12808B | 16 | 18 | 19 |
| 12812B | 14 | 12 | 19 |
| 12816B | 14 | 14 | 16 |
| 12833B | 64 | 40 | 22 |
| 12834B | −2 | 11 | −3 |
| 12835B | 78 | 37 | 45 |
| 12839B | 13 | 6 | 23 |
| 12841B | 29 | 1 | 10 |
| 12843B | 10 | 8 | 17 |
| 12844B | 20 | 10 | 12 |
| 12845B | 11 | 3 | 18 |
| 12847B | 3 | 13 | 11 |
| 12848B | 13 | 9 | 19 |
| 12850B | 18 | 8 | 10 |
| 31863B | 24 | 7 | 13 |
| 31874B | 16 | −1 | 14 |
| 69261 | 11 | 16 | 19 |
| 69263 | 14 | 4 | 14 |
| 69305 | 3 | 5 | 3 |
| 69307 | 12 | 12 | 9 |
| 69323 | 12 | 17 | 7 |
| 69326 | −2 | 12 | 18 |
| 69329 | 8 | 19 | 25 |
| 69331 | 9 | 13 | 7 |
| 69332 | 18 | 22 | 6 |
| 69340 | 3 | 13 | 6 |
| 69348 | 40 | 16 | 0 |

### Example 4. Anti-TFRC:GAA Gene Therapy

[0695] In this example, the ability of various anti-TFRC molecules to cross the blood-brain barrier and localize to the parenchyma of the brain was evaluated. Delivery of the molecules via episomal AAV liver depot was also evaluated along with rescue of the glycogen storage phenotype in various tissues.

### In Vivo Screening of Anti-hTFRC Scfv by HDD

[0696] To further evaluate the anti-human TFRC antibodies that were screened for binding in vitro, in vivo mouse studies in Tfrc^{hum/hum} knock-in mice were performed to evaluate blood-brain-barrier (BBB) crossing. This screen of 31 antibodies revealed 11 that had mature hGAA protein in brain homogenate detected by Western blot.

### GAA Fusions by Hydrodynamic Delivery (HDD)

[0697] Human TFRC knock-in mice were injected with DNA plasmids expressing the various anti-hTFRC antibodies in the anti-hTFRC scfv:2xG₄S(SEQ ID NO: 617):hGAA format under the liver-specific mouse TTR promoter. Mice received 50 μg of DNA in 0.9% sterile saline diluted to 10% of the mouse's body weight (0.1 mL/g body weight). Forty-eight hours post-injection, tissues were dissected from mice immediately after sacrifice by CO₂ asphyxiation, snap frozen in liquid nitrogen, and stored at −80° C.

### Western Blot: (FIGS. 2A-2C)

[0698] Tissue lysates were prepared by lysis in RIPA buffer with protease inhibitors (1861282, Thermo Fisher, Waltham, MA, USA). Tissue lysates were homogenized with a bead homogenizer (FastPrep5, MP Biomedicals, Santa Ana, CA, USA). Cells or tissue lysates were run on SDS-PAGE gels using the Novex system (LifeTech Thermo, XP04200BOX, LC2675, LC3675, LC2676). Gels were transferred to low-fluorescence polyvinylidene fluoridev (PVDF) membrane (IPFL07810, LI-COR, Lincoln, NE, USA) and stained with Revert 700 Total Protein Stain (TPS; 926-11010 LI-COR, Lincoln, NE, USA), followed by blocking with Odyssey blocking buffer (927-500000, LI-COR, Lincoln, NE, USA) in Tris buffer saline with 0.1% Tween 20 and staining with antibodies against GAA (ab137068, Abcam, Cambridge, MA, USA), or anti-GAPDH (ab9484, Abcam, Cambridge, MA, USA) and the appropriate secondary (926-32213 or 925-68070, LI-COR, Lincoln, NE, USA). Blots were imaged with a LI-COR Odyssey CLx.

[0699] Protein band intensity was quantified in LI-COR Image Studio software. The quantification of the mature 77 kDa GAA band for each sample was determined by first normalizing to the lane's TPS signal, then normalizing to GAA levels in the serum (loading control and liver expression control, respectively). Values were then compared to the positive control group anti-mouse TFRC scfv:hGAA in Wt mice, and negative control group anti-mTFRC scfv:hGAA in Tfrc^{hum/hum} mice (FIGS. 2A-2C, Table 17).

TABLE 17
Quantification of mature hGAA protein in brain homogenate
from mice treated HDD with anti-hTFRC scfv:hGAA plasmids

| | | Mature hGAA |
|---|---|---|
| | | protein in brain |
| | | (normalized to |
| Treatment group | Genotype | positive control) |
| anti-mTFRCscfv:hGAA | Wt | 1.00 ± 0.43* |
| (positive control) | | |
| anti-mTFRCscfv:hGAA | Tfrc^{hum/hum} | 0.02 ± 0.03 |
| (negative control) | | |
| 69261scfv:hGAA | Tfrc^{hum/hum} | 0.67 ± 0.50 |
| 69307scfv:hGAA | Tfrc^{hum/hum} | 1.08 ± 0.19 |
| 69323scfv:hGAA | Tfrc^{hum/hum} | 0.91 ± 0.46 |
| 69329scfv:hGAA | Tfrc^{hum/hum} | 0.65 ± 0.13 |
| 69340scfv:hGAA | Tfrc^{hum/hum} | 0.55 ± 0.58 |
| 69348scfv:hGAA | Tfrc^{hum/hum} | 0.50 ± 0.05 |
| 12795scfv:hGAA | Tfrc^{hum/hum} | 0.27 ± 0.20 |
| 12798scfv:hGAA | Tfrc^{hum/hum} | 0.72 ± 0.42 |
| 12799scfv:hGAA | Tfrc^{hum/hum} | 1.05 ± 0.51* |
| 12801scfv:hGAA | Tfrc^{hum/hum} | 0.49 ± 0.18 |
| 12802scfv:hGAA | Tfrc^{hum/hum} | 0.29 ± 0.27 |
| 12839scfv:hGAA | Tfrc^{hum/hum} | 1.29 ± 0.27** |
| 12841 scfv:hGAA | Tfrc^{hum/hum} | 1.72 ± 0.06*** |
| 12843scfv:hGAA | Tfrc^{hum/hum} | 1.79 ± 0.85*** |
| 12845scfv:hGAA | Tfrc^{hum/hum} | 3.08 ± 0.92*** |
| 12847scfv:hGAA | Tfrc^{hum/hum} | 1.24 ± 0.30 |
| 12848scfv:hGAA | Tfrc^{hum/hum} | 0.59 ± 0.16 |
| 12850scfv:hGAA | Tfrc^{hum/hum} | 0.47 ± 0.05 |

Data quantified from western blot as arbitrary units (FIGS. 2A-2C).
All values are mean ± SD, n = 3-6 per group.
One Way ANOVA vs. negative control anti-mTFRC scfv:hGAA in Tfrc^{hum/hum} mice;
*p < 0.05;
**p < 0.005;
***p < 0.0001

[0700] The control anti-mTRFC that was conjugated to GAA was 8D3 scFv. The 8D3 scFv has the heavy chain amino acid sequence:

(SEQ ID NO: 490)
EVQLVESGGGLVQPGNSLTLSCVASGFTFSNYGMHWIRQAPKKGLEWIAM
IYYDSSKMNYADTVKGRFTISRDNSKNTLYLEMNSLRSEDTAMYYCAVPT
SHYVVDVWGQGVSVTVSS,

and the light chain amino acid sequence:

(SEQ ID NO: 491)
DIQMTQSPASLSASLEEIVTITCQASQDIGNWLAWYQQKPGKSPQLLIYG
ATSLADGVPSRFSGSRSGTQFSLKISRVQVEDIGIYYCLQAYNTPWTFGG
GTKLELK.

Capillary Depletion of Brain Samples Following HDD of Anti-hTFRC Scfv:hGAA Plasmids

[0701] Anti-hTFRC scfv:hGAA molecules from Table 17 were tested in a secondary screen in Tfrc^{hum} mice to determine whether hGAA was present in the brain parenchyma, and not trapped in the BBB endothelial cells. Four molecules (12799, 12839, 12843, and 12847) identified in screen as being present in parenchyma based on mature hGAA in the parenchyma fraction on Western blot, as well as high affinity to cyno TFRC.

[0702] Animals were treated HDD as detailed above. Forty-eight hours post-injection, mice were perfused with 30 mL 0.9% saline immediately after sacrifice by CO₂ asphyxiation. A 2 mm coronal slice of cerebrum was taken between bregma and −2 mm bregma and placed in 700 uL physiological buffer (10 mM HEPES, 4 mM KCl, 2.8 mM CaCl₂, 1 mM MgSO₄, 1 mM NaH₂PO₄, 10 mM D-glucose in 0.9% saline pH 7.4) on ice. Brain slices were gently homogenized on ice with a glass dounce homogenizer. An equivalent volume of 26% dextran (MW 70,000 Da) in physiological buffer was added (final 13% dextran) and homogenized 10 more strokes. Parenchyma (supernatant) and endothelial (pellet) fractions were separated by centrifugation at 5,400 g for 15 min at 4° C. Anti-hGAA western blot was performed on fractions as detailed above (FIG. 3, Table 18). Blots were also probed with anti-CD31 endothelial marker (Abcam ab182982).

TABLE 18
Quantification of mature hGAA protein in brain parenchyma fractions and BBB
endothelial fractions of mice treated HDD with anti-hTFRC scfv:hGAA plasmids

| | | Mature hGAA protein | Mature hGAA protein | Affinity to |
|---|---|---|---|---|
| | | in brain parenchyma | in brain endothelium | mfTFRC (% |
| | | (normalized to positive | (normalized to positive | of hTFRC |
| Treatment group | Genotype | control) | control) | binding) |
| anti- | Wt | 1.00 | 5.82 | ND |
| mTFRCscfv:hGAA | | | | |
| (positive control) | | | | |
| anti- | Tfrc^{hum/hum} | 0.00 | 0.01 | ND |
| mTFRCscfv:hGAA | | | | |
| (negative control) | | | | |
| 69307scfv:hGAA | Tfrc^{hum/hum} | 1.24 | 10.73 | 0% |
| 69323scfv:hGAA | Tfrc^{hum/hum} | 0.62 | 4.18 | 7% |
| 12798scfv:hGAA | Tfrc^{hum/hum} | 0.91 | 8.37 | 34% |
| 12799scfv:hGAA | Tfrc^{hum/hum} | 0.44 | 3.99 | 126% |
| 12839scfv:hGAA | Tfrc^{hum/hum} | 0.55 | 0.84 | 78% |
| 12841scfv:hGAA | Tfrc^{hum/hum} | 0.78 | 4.23 | 8% |
| 12843scfv:hGAA | Tfrc^{hum/hum} | 1.13 | 12.99 | 75% |
| 12845scfv:hGAA | Tfrc^{hum/hum} | 2.04 | 13.06 | 25% |
| 12847scfv:hGAA | Tfrc^{hum/hum} | 0.60 | 4.96 | 102% |
| 12848scfv:hGAA | Tfrc^{hum/hum} | 0.17 | 1.24 | 29% |
| 12850scfv:hGAA | Tfrc^{hum/hum} | 0.22 | 2.25 | 13% |

hGAA protein quantified from western blot as arbitrary units (FIG. 3).
n = 1 per group.
Affinity to cynomolgus macaque TFRC Luminex data, calculated as percent of binding to hTFRC: (mfTFRC binding ÷ hTFRC binding) × 100

TABLE 19
Quantification of hGAA protein in quadricep of mice
treated HDD with anti-hTFRC scfv:hGAA plasmids

| | | hGAA protein in |
|---|---|---|
| | | quadricep (normalized |
| Treatment group | Genotype | to positive control) |
| Saline (vehicle) | Tfrc^{hum/hum} | 0.38 ± 0.25 |
| anti-mTFRCscfv:hGAA | Wt | 1.07 ± 0.27 |
| (positive control) | | |
| anti-mTFRCscfv:hGAA | Tfrc^{hum/hum} | 0.56 ± 0.17 |
| (negative control) | | |
| 69307scfv:hGAA | Tfrc^{hum/hum} | 0.58 ± 0.18 |
| 69323scfv:hGAA | Tfrc^{hum/hum} | 1.10 ± 0.19 |
| 12798scfv:hGAA | Tfrc^{hum/hum} | 1.33 ± 0.56 |
| 12799scfv:hGAA | Tfrc^{hum/hum} | 0.67 ± 0.18 |
| 12839scfv:hGAA | Tfrc^{hum/hum} | 1.80 ± 0.18 |
| 12841scfv:hGAA | Tfrc^{hum/hum} | 1.15 ± 0.12 |
| 12843scfv:hGAA | Tfrc^{hum/hum} | 1.78 ± 0.43 |
| 12845scfv:hGAA | Tfrc^{hum/hum} | 1.70 ± 1.33 |
| 12847scfv:hGAA | Tfrc^{hum/hum} | 7.74 ± 9.42 |
| 12848scfv:hGAA | Tfrc^{hum/hum} | 0.82 ± 0.18 |
| 12850scfv:hGAA | Tfrc^{hum/hum} | 0.76 ± 0.34 |

Capillary Depletion of Mouse Brain Samples Following Liver-Depot AAV8 Anti-hTFRC Scfv:hGAA Treatment

[0703] To confirm our HDD screen findings in a more long-term treatment model, we treated Tfrc^{hum} mice with anti-hTFRC scfv:hGAA_molecules delivered as episomal liver depot AAV8 anti-hTFRC scfv:GAA under the TTR promoter. We found that all 4 molecules (12799, 12843, 12847 and 12839) delivered mature hGAA to the brain parenchyma when delivered as AAV8.

### AAV Production and In Vivo Transduction

[0704] Recombinant AAV8 (AAV2/8) was produced in HEK293 cells. Cells were transfected with three plasmids encoding adenovirus helper genes, AAV8 rep and cap genes, and recombinant AAV genomes containing transgenes flanked by AAV2 inverted terminal repeats (ITRs). On day 5, cells and medium were collected, centrifuged, and processed for AAV purification. Cell pellets were lysed by freeze-thaw and cleared by centrifugation. Processed cell lysates and medium were overlaid onto iodixanol gradients columns and centrifuged in an ultracentrifuge. Virus fractions were removed from the interface between the 40% and 60% iodixanol solutions and exchanged into 1×PBS with desalting columns. AAV vg (vg=viral genomes) were quantified by ddPCR. AAVs were diluted in PBS+0.001% F-68 Pluronic immediately prior to injection. Tfrc^{hum} mice were dosed with 3e12 vg/kg body weight in a volume of ˜100 uL. Mice were sacrificed 4 weeks post injection and capillary depletion and western blotting were performed as described above (FIG. 4, Table 20).

TABLE 20
Quantification of mature hGAA protein in brain parenchyma
fractions and BBB endothelial fractions of mice treated
with liver-depot AAV8 anti-hTFRC scfv:hGAA

| | | Mature hGAA | Mature hGAA |
|---|---|---|---|
| | | protein in brain | protein in brain |
| | | parenchyma | endothelium |
| | | (normalized to | (normalized to |
| Treatment group | Genotype | positive control) | positive control) |
| anti- | Wt | 1.00 | 1.00 |
| mTFRCscfv:hGAA | | | |
| (positive control) | | | |
| anti- | Tfrc^{hum/hum} | 0.02 | 0.01 |
| mTFRCscfv:hGAA | | | |
| (negative control) | | | |
| 12799scfv:hGAA | Tfrc^{hum/hum} | 0.94 | 0.94 |
| 12839scfv:hGAA | Tfrc^{hum/hum} | 0.49 | 0.62 |
| 12843scfv:hGAA | Tfrc^{hum/hum} | 0.61 | 0.63 |
| 12847scfv:hGAA | Tfrc^{hum/hum} | 1.90 | 1.33 |

Data quantified from western blot as arbitrary units (FIG. 4).
n = 1 per group

Rescue of Glycogen Storage Phenotype in Gaa^{-/-}/Tfrc^{hum} Mice with AAV8 Episomal Liver Depot Anti-hTFRC Scfv:GAA

[0705] Anti-hTFRC scfv:GAA molecules in Pompe disease model mice were tested to determine whether anti-hTFRCscfv:GAA rescued the glycogen storage phenotype. The molecules, 12839, 12843, 12847, normalized glycogen to Wt levels. (12799 not tested).

[0706] AAV production and in vivo transduction were performed as above. Gaa^{-/-}/Tfrc^{hum} mice were dosed with 2e12 vg/kg AAV8. Tissues were harvested 4 weeks post-injection and flash-frozen as above. hGAA Western blot was performed as above (FIG. 5, Table 21).

### Glycogen Quantification

[0707] Tissues were dissected from mice immediately after sacrifice by CO₂ asphyxiation, snap frozen in liquid nitrogen, and stored at −80° C. Tissues were lysed on a benchtop homogenizer with stainless steel beads in distilled water for glycogen measurements or RIPA buffer for protein analyses. Glycogen analysis lysates were boiled and centrifuged to clear debris. Glycogen measurements were performed fluorometrically with a commercial kit according to manufacturer's instructions (K646, BioVision, Milpitas, CA, USA). See Table 22 and FIG. 6.

TABLE 21
Quantification of hGAA protein in tissues of Gaa^{-/-}/Tfrc^{hum}
mice treated with liver-depot AAV8 anti-hTFRC scfv:hGAA

| | | | | | | Spinal | | |
|---|---|---|---|---|---|---|---|---|
| Treatment group | n | Serum * | Liver * | Cerebrum ** | Cerebellum ** | Cord ** | Heart ** | Quadricep ** |
| Gaa^{-/-} Untreated | 1 | 0.00 | 0.02 | 0.00 | 0.00 | 0.00 | 0.02 | 0.01 |
| Gaa^{-/-} 12839scfv:hGAA | 3 | 2.42 ± | 1.63 ± | 0.14 ± | 0.13 ± | 0.19 ± | 0.53 ± | 0.14 ± |
| | | 2.41 | 0.96 | 0.12 | 0.12 | 0.19 | 0.52 | 0.16 |
| Gaa^{-/-} 12843scfv:hGAA | 3 | 2.07 ± | 2.23 ± | 0.17 ± | 0.11 ± | 0.17 ± | 0.49 ± | 0.18 ± |
| | | 1.35 | 0.08 | 0.07 | 0.05 | 0.09 | 0.31 | 0.06 |
| Gaa^{-/-} 12847scfv:hGAA | 3 | 1.56 ± | 1.40 ± | 0.25 ± | 0.21 ± | 0.42 ± | 0.58 ± | 0.19 ± |
| | | 0.71 | 0.13 | 0.04 | 0.09 | 0.19 | 0.17 | 0.08 |

Data quantified from western blot as arbitrary units (FIG. 5). All values are mean ± SD, n = 1-3 per group.
* Total hGAA protein;
** Mature hGAA protein

TABLE 22
Quantification of glycogen in tissues of Gaa^{-/-}/
Tfrc^{hum} mice treated with liver-depot AAV8 anti-hTFRC scfv:hGAA

| Treatment group | Cerebrum | Cerebellum | Spinal Cord | Heart | Quadricep |
|---|---|---|---|---|---|
| Wt Untreated | 0.06 ± 0.04* | 0.01 ± 0.04* | 0.05 ± 0.05* | 0.08 ± 0.02* | 0.34 ± 0.19* |
| Gaa−/− Untreated | 2.34 ± 0.58 | 2.51 ± 0.38 | 3.08 ± 0.23 | 25.30 ± 6.06 | 13.05 ± 0.98 |
| Gaa−/− 12839scfv:hGAA | 0.11 ± 0.03* | 0.46 ± 0.08* | 0.08 ± 0.10* | 0.68 ± 0.68* | 2.15 ± 2.52* |
| Gaa−/− 12843scfv:hGAA | 0.09 ± 0.02* | 0.09 ± 0.08* | 0.13 ± 0.13* | 0.09 ± 0.01* | 1.22 ± 1.39* |
| Gaa−/− 12847scfv:hGAA | 0.05 ± 0.01* | 0.02 ± 0.03* | 0.20 ± 0.33* | 0.11 ± 0.11* | 0.80 ± 0.79* |

All values are glycogen ug/mg tissue, mean ± SD, n = 3-4 per group.
One Way ANOVA
*p < 0.0001 vs. Gaa^{-/-} Untreated group

Rescue of Glycogen Storage in Brain and Muscle in Gaa^{-/-}/Tfrc^{hum} Mice with AAV8 Episomal Liver Depot Anti-hTFRC Scfv:GAA

[0708] Anti-hTFRCscfv:GAA molecules, 12799, 12843, and 12847, were tested in Pompe disease model mice to determine whether they rescued the glycogen storage phenotype. Histology was performed on brain and muscle sections to visualize glycogen in the tissues. All 3 molecules reduced glycogen staining in the brain and muscle.

[0709] AAV production and in vivo transduction were performed as above. Three month old Gaa^{-/-}/Tfrc^{hum} mice were dosed with 4e11 vg/kg AAV8. Four weeks post-injection, tissues were frozen for glycogen analysis as above (Table 23). For histology, animals were perfused with saline (0.9% NaCl), and tissues were drop-fixed overnight in 10% Normal Buffered Formalin. Tissues were washed 3× in PBS and stored in PBS/0.01% sodium azide until embedding. Tissues were embedded in paraffin and 5 um sections were cut from brain (coronal, −2 mm bregma) and quadricep (fiber cross-section). Sections were stained with Periodic Acid-Schiff and Hematoxylin using standard protocols (FIGS. 7A-7D).

TABLE 23
Quantification of glycogen in tissues of Gaa^{-/-}/
Tfrc^{hum} mice treated with liver-depot AAV8 anti-hTFRC scfv:hGAA

| Treatment group | Cerebellum | Quadricep |
|---|---|---|
| Wt Untreated | 0.02 ± 0.03* | 0.55 ± 0.10* |
| Gaa−/− Untreated | 1.91 ± 0.26 | 12.19 ± 3.02 |
| Gaa−/− 12799scfv:hGAA | 0.10 ± 0.06* | 1.34 ± 0.9* |
| Gaa−/− 12843scfv:hGAA | 0.09 ± 0.06* | 1.09 ± 1.27* |
| Gaa−/− 12847scfv:hGAA | 0.07 ± 0.06* | 0.72 ± 0.64* |

All values are glycogen ug/mg tissue, mean ± SD, n = 5-8 per group.
One Way ANOVA
*p < 0.0001 vs. Gaa^{-/-} Untreated group

### Example 5. Iron Assay

[0710] This Example evaluated the effect of anti-TfR antigen-binding proteins on iron homeostasis in mice.

### Validating TFRC Expression in Tfrc^{hum} Mice and Assessing Iron Homeostasis

[0711] To validate that Tfrc^{hum} mice expressed TFRC at physiological levels and had normal iron homeostasis, we compared Tfrc^{hum} mice to Wt mice and quantified expression of TFRC in tissues, serum markers, tissue iron content, and transferrin in tissues. Overall, TFRC expression and iron homeostasis was normal in the Tfrc^{hum} mice.

[0712] Six month old Wt mice (11 males, 4 females) and Tfrc^{hum} mice (10 males, 8 females) were analyzed in this experiment. Tissues were dissected from mice immediately after sacrifice by CO₂ asphyxiation, snap frozen in liquid nitrogen, and stored at −80° C.

Tfrc RNA Quantification by qPCR

[0713] Total RNA was isolated from tissues with Trizol following manufacturer protocol (ThermoFisher 15596026). Tfrc RNA was quantified by Tagman qPCR (ThermoFisher) following standard protocols using universal primers to exon 1 that amplify from both Wt and Tfrc^{hum} mice (GCTGCATTGCGGACTGTAGA (SEQ ID NO: 642)/TCCATCATTCTCAGCTGCTACAA (SEQ ID NO: 643)). ΔΔCT values were calculated relative to the Wt male group. Data in Table 24.

### Serum Assays

[0714] Blood was collected from mice by cardiac puncture immediately following CO₂ asphyxiation and serum was separated using serum separator tubes (BD Biosciences, 365967). Serum iron and Total Iron Binding Content (TIBC) were quantified using standard protocols. Serum hepcidin was quantified by ELISA kit (Intrinsic Life Sciences SKU HMC-001). Data in Table 25.

### Tissue Iron Content

[0715] Wet tissue was weighed to achieve uniformity and then dried for 72 hours in an open tube at 56° C. Tissue was then placed in digestion buffer (10% Tricloroacetic acid and 37% HCL) and heated at 65° C. for 48 hours. To assay iron content, the supernatant was placed in a 96 well plate and incubated in a color development solution (Thioglycolic acid, bathophenanthroline acid and sodium acetate). Absorbance was read on a Spectramax i3 by Molecular Devices and Graph Pad Prism was used to interpolate the sample absorbance values read against a standard curve to calculate iron content in the whole piece of tissue. Iron content was then calculated based on dry weight. Data in Table 26.

### Transferrin ELISA

[0716] All tissues were homogenized using a Fastprep-24 5G from MP Biomedicals. Prior to homogenization, tissues were placed in RIPA buffer with phosphatase and HALT protease inhibitors (ThermoFisher), homogenized with their organ specific protocol and then centrifuged to pellet debris. The supernatant was collected and assayed for total protein using a Pierce BCA Protein Assay Kit. Absorbance was measured on a Spectramax i3 by Molecular Devices. Once total protein was measured, all samples were diluted to match the least concentrated sample so loading would be uniform for the ELISA. Kits obtained from Abcam were used to measure the presence of total transferrin in tissue homogenate (Abcam ab157724). Plates were run in accordance with the supplied protocol using the provided reagents and absorbance was read on a Spectramax i3 by Molecular Devices. Graph Pad Prism was used to interpolate the sample absorbance values read against a standard curve. Data in Table 27.

TABLE 24
Tfrc RNA quantification in untreated Wt and Tfrc^{hum} mice

| Genotype | Sex | Liver Tfrc | Quadricep Tfrc | Brain Tfrc |
|---|---|---|---|---|
| Wt | M | 1.02 ± 0.21 | 1.10 ± 0.53 | 1.02 ± 0.21 |
| Wt | F | 1.11 ± 0.64 | 0.60 ± 0.17 | 1.03 ± 0.13 |
| Tfrc^{hum} | M | 1.14 ± 0.28 | 1.02 ± 0.39 | 1.86 ± 0.35* |
| Tfrc^{hum} | F | 0.75 ± 0.22 | 0.43 ± 0.93 | 1.88 ± 0.25* |

All values are ΔΔCT vs. Wt males group, mean ± SD, n = 4-11 per group.
One Way ANOVA
*p < 0.001 vs. Wt sex-matched group

TABLE 25
Serum iron markers in untread Wt and Tfrc^{hum} mice

| | | Serum Iron | Serum | Serum Hepcidin |
|---|---|---|---|---|
| Genotype | Sex | ug/dL | TIBC ug/dL | ng/mL |
| Wt | M | 146.73 ± 20.30 | 360.18 ± 27.02 | 416.73 ± 133.04 |
| Wt | F | 125.50 ± 9.04 | 342.25 ± 22.25 | 436.35 ± 143.28 |
| Tfrc^{hum} | M | 173.00 ± 12.77* | 351.20 ± 21.94 | 415.86 ± 101.27 |
| Tfrc^{hum} | F | 156.75 ± 14.18* | 353.50 ± 17.03 | 523.30 ± 175.70 |

All values are mean ± SD, n = 4-11 per group.
All values are within normal physiological range.
One Way ANOVA
*p < 0.05 vs. Wt sex-matched group

TABLE 26
Tissue iron quantification in untread Wt and Tfrc^{hum} mice

| Genotype | Sex | Liver | Spleen |
|---|---|---|---|
| Wt | M | 307.03 ± 32.74 | 1666.38 ± 239.18 |
| Wt | F | 507.45 ± 110.45 | 1833.12 ± 173.36 |
| Tfrc^{hum} | M | 300.00 ± 33.77 | 1818.44 ± 276.86 |
| Tfrc^{hum} | F | 638.46 ± 139.03 | 1695.96 ± 140.02 |

All values are ug/g dry tissue, mean ± SD, n = 4-11 per group.
Values are non-significant (One Way ANOVA vs. Wt sex-matched group).

TABLE 27
Transferrin protein in untreated Wt and Tfrc^{hum} mice (ELISA)

| Genotype | Sex | Serum | Liver | Cerebrum |
|---|---|---|---|---|
| Wt | M | 1191.28 ± 137.03 | 32.61 ± 9.87 | 7.35 ± 1.30 |
| Wt | F | 1270.81 ± 138.42 | 27.01 ± 13.22 | 6.33 ± 0.93 |
| Tfrc^{hum} | M | 1251.40 ± 113.59 | 32.97 ± 7.26 | 7.92 ± 1.63 |
| Tfrc^{hum} | F | 1425.89 ± 290.77 | 40.17 ± 8.22 | 8.26 ± 2.08 |

All values are ug/mL homogenate normalized to protein content; mean ± SD, n = 4-11 per group.
Values are non-significant (One Way ANOVA vs. Wt sex-matched group).

Rescue of Glycogen Storage in Brain and Muscle in Gaa^{-/-}/Tfrc^{hum} Mice with AAV8 Episomal Liver Depot Anti-hTFRC Scfv:GAA

[0717] We tested the anti-hTFRC scfv:GAA leads 12799, 12843, and 12847 in Pompe disease model mice to determine whether anti-hTFRC scfv:GAA rescued the glycogen storage phenotype (glycogen data in other data package). Here we also tested whether treatment with anti-TFRCscfv:GAA leads altered iron homeostasis (Tables 28, 29, and 30). We found that 4-week treatment did not affect iron homeostasis with any of the leads.

TABLE 28
Serum iron markers in Gaa^{-/-}/Tfrc^{hum} mice treated
with AAV8 episomal liver depot anti-hTFRC scfv:GAA

| | Serum iron | Serum TIBC | Serum Hepcidin |
|---|---|---|---|
| Treatment group | ug/dL | ug/dL | ng/mL |
| Wt Untreated | 203.83 ± 29.49 | 334.33 ± 17.83 | 265.89 ± 60.71 |
| Gaa^{-/-} | 196.50 ± 25.15 | 326.50 ± 34.39 | 329.19 ± 124.11 |
| Untreated | | | |
| Gaa^{-/-} | 188.50 ± 32.83 | 319.14 ± 28.20 | 341.25 ± 104.87 |
| 12799scfv:hGAA | | | |
| Gaa^{-/-} | 163.63 ± 28.27 | 275.88 ± 65.67 | 298.47 ± 104.60 |
| 12843scfv:hGAA | | | |
| Gaa^{-/-} | 159.29 ± 19.09 | 323.00 ± 24.82 | 387.47 ± 69.56 |
| 12847scfv:hGAA | | | |

All values are mean ± SD, n = 5-8 per group.
All values are non-significant (One Way ANOVA)

TABLE 29
Tissue iron quantification in Gaa^{-/-}/Tfrc^{hum} mice treated
with AAV8 episomal liver depot anti-hTFRC scfv:GAA

| Treatment group | Liver | Heart | Spleen |
|---|---|---|---|
| Wt Untreated | 228.12 ± 37.65 | 349.78 ± 27.98 | 893.68 ± 216.93 |
| Gaa^{-/-} Untreated | 260.59 ± 49.54 | 355.82 ± 48.43 | 1258.57 ± 600.35 |
| Gaa^{-/-} 12799scfv:hGAA | 285.07 ± 67.17 | 350.44 ± 51.70 | 1251.36 ± 628.45 |
| Gaa^{-/-} 12843scfv:hGAA | 279.64 ± 41.89 | 360.78 ± 37.34 | 906.81 ± 280.82 |
| Gaa^{-/-} 12847scfv:hGAA | 336.33 ± 85.74 | 391.67 ± 58.36 | 1773.74 ± 374.26 |

All values are ug/g dry tissue, mean ± SD, n = 5-8 per group.
All values are non-significant (One Way ANOVA).

TABLE 30
Transferrin protein in Gaa^{-/-}/Tfrc^{hum} mice treated with
AAV8 episomal liver depot anti-hTFRC scfv:GAA (ELISA)

| Treatment group | Liver | Spleen | Cerebrum |
|---|---|---|---|
| Wt Untreated | 19.82 ± 4.73 | 3.17 ± 1.46 | 10.69 ± 1.05 |
| Gaa^{-/-} Untreated | 14.71 ± 7.37 | 6.36 ± 2.59 | 12.54 ± 2.07 |
| Gaa^{-/-} 12799scfv:hGAA | 16.66 ± 6.99 | 5.87 ± 2.48 | 10.34 ± 1.49 |
| Gaa^{-/-} 12843scfv:hGAA | 14.16 ± 5.93 | 5.67 ± 1.95 | 11.19 ± 2.56 |
| Gaa^{-/-} 12847scfv:hGAA | 13.81 ± 3.04 | 5.70 ± 1.30 | 13.72 ± 1.87 |

All values are ug/mL homogenate normalized to protein content; mean ± SD, n = 5-8 per group.
Values are non-significant (One Way ANOVA vs. Gaa^{-/-} Untreated group).

### Example 6. Insertion Anti-hTFRC:GAA Gene Therapy in Mice

### mAb Clone IDs

[0718] H1H12847B in scfv:GAA format (REGN16826)
[0719] 12450NVH in scfv:GAA format (comparator, REGN5534)
   Insertion of Anti-hTFRC 12847Scfv:GAA in Gaa^{-/-}/Tfrc^{hum} Mice

[0720] We tested our lead anti-hTFRC 12847scfv:GAA in Pompe disease model mice by albumin insertion to determine whether we could replicate the results we saw with episomal AAV8 liver depot expression. Albumin insertion of 12847scfv:GAA delivered mature hGAA protein to the brain and muscle, and rescued the glycogen storage phenotype in Gaa^{-/-}/Tfrc^{hum/hum} mice. These data were produced with the native 12847scfv:GAA sequence that is not optimized.

[0721] We compared 12847scfv:GAA to the muscle-targeted anti-hCD63scfv:GAA in Gaa^{-/-}/Cd63^{hum} mice.

### AAV Production

[0722] A promoterless AAV genome plasmid was created with the 12847scfv:GAA sequence and the mouse albumin exon 1 splice acceptor site at the 3′ end. Recombinant AAV8 (AAV2/8) was produced in HEK293 cells. Cells were transfected with three plasmids encoding adenovirus helper genes, AAV8 rep and cap genes, and recombinant AAV genomes containing transgenes flanked by AAV2 inverted terminal repeats (ITRs). On day 5, cells and medium were collected, centrifuged, and processed for AAV purification. Cell pellets were lysed by freeze-thaw and cleared by centrifugation. Processed cell lysates and medium were overlaid onto iodixanol gradients columns and centrifuged in an ultracentrifuge. Virus fractions were removed from the interface between the 40% and 60% iodixanol solutions and exchanged into 1×PBS with desalting columns. AAV vg were quantified by ddPCR.

In Vivo CRISPR/Cas9 Insertion into the Albumin Locus

[0723] Three month old Gaa^{-/-}/Tfrc^{hum/hum} mice were dosed via tail vein injection with 3e12 vg/kg AAV8 12847scfv:GAA and 3 mg/kg LNP gRNA/Cas9 mRNA diluted in PBS+0.001% F-68 Pluronic. Mice were sacrificed 3 weeks post injection. Negative control mice received insertion AAV8 without LNP. Positive control mice were dosed with 4e11 vg/kg episomal liver depot AAV8 12847scfv:GAA under the TTR promoter (phenotype rescue data previously shown). Tissues were dissected from mice immediately after sacrifice by CO₂ asphyxiation, snap frozen in liquid nitrogen, and stored at −80° C. Blood was collected from mice by cardiac puncture immediately following CO₂ asphyxiation and serum was separated using serum separator tubes (BD Biosciences, 365967).

TABLE 31
Treatment groups and controls

| Treatment group | Genotype | Function |
|---|---|---|
| Wt Untreated | Tfrc^{hum} | Normal untreated mouse control |
| Gaa^{-/-} untreated | Gaa^{-/-}/ | Untreated Pompe disease mouse |
| | Tfrc^{hum} | |
| Gaa^{-/-}- insertion AAV only | Gaa^{-/-}/ | Negative control for insertion (no Cas9/gRNA delivered) |
| | Tfrc^{hum} | |
| Gaa^{-/-} episomal AAV8 TTR | Gaa^{-/-}/ | Positive control, previously shown rescue of glycogen |
| 12847scfv:hGAA | Tfrc^{hum} | storage phenotype |
| Gaa^{-/-} insertion 12847scfv:hGAA | Gaa^{-/-}/ | Experimental insertion group |
| | Tfrc^{hum} | |
| Gaa^{-/-} untreated | Gaa^{-/-}/ | Untreated Pompe disease mouse (CD63 humanized) |
| | Cd63^{hum} | |
| Gaa^{-/-} insertion anti- | Gaa^{-/-}/ | Negative control for BBB-crossing (muscle targeted) |
| CD63scfv:hGAA | Cd63^{hum} | |

### Western Blot: (Table 32, FIG. 8)

[0724] Tissue lysates were prepared by lysis in RIPA buffer with protease inhibitors (1861282, Thermo Fisher, Waltham, MA, USA). Tissue lysates were homogenized with a bead homogenizer (FastPrep5, MP Biomedicals, Santa Ana, CA, USA). Cells or tissue lysates were run on SDS-PAGE gels using the Novex system (LifeTech Thermo, XPO4200BOX, LC2675, LC3675, LC2676). Gels were transferred to low-fluorescence polyvinylidene fluoridev (PVDF) membrane (IPFL07810, LI-COR, Lincoln, NE, USA) and stained with Revert 700 Total Protein Stain (TPS; 926-11010 LI-COR, Lincoln, NE, USA), followed by blocking with Odyssey blocking buffer (927-500000, LI-COR, Lincoln, NE, USA) in Tris buffer saline with 0.1% Tween 20 and staining with antibodies against GAA (ab137068, Abcam, Cambridge, MA, USA), or anti-GAPDH (ab9484, Abcam, Cambridge, MA, USA) and the appropriate secondary (926-32213 or 925-68070, LI-COR, Lincoln, NE, USA). Blots were imaged with a LI-COR Odyssey CLx.

[0725] Protein band intensity was quantified in LI-COR Image Studio software. The quantification of the mature 77 kDa GAA band for each sample was determined by normalizing to the lane's TPS signal (loading control).

### Glycogen Quantification: (Table 33, FIG. 9)

[0726] Tissues were dissected from mice immediately after sacrifice by CO₂ asphyxiation, snap frozen in liquid nitrogen, and stored at −80° C. Tissues were lysed on a benchtop homogenizer with stainless steel beads in distilled water for glycogen measurements or RIPA buffer for protein analyses. Glycogen analysis lysates were boiled and centrifuged to clear debris. Glycogen measurements were performed fluorometrically with a commercial kit according to manufacturer's instructions (K646, BioVision, Milpitas, CA, USA).

TABLE 32
Quantification of hGAA protein in tissues of Gaa^{-/-}
/Tfrc^{hum}/^{hum} mice treated with insertion anti-hTFRC 12847scfv:hGAA

| | | | Cerebrum | Quadricep |
|---|---|---|---|---|
| | Liver | Serum | mature | mature |
| Treatment group | total hGAA | total hGAA | hGAA | hGAA |
| Gaa^{-/-} insertion AAV only negative control | 0.02 ± 0.003 | 0.03 ± 0.02 | 0.002 ± 0.001 | 0.006 ± 0.002 |
| Gaa^{-/-} episomal AAV8 TTR 12847scfv:hGAA | 2.35 ± 0.72 | 3.65 ± 2.09 | 0.49 ± 0.20^{§§} | 0.148 ± 0.043^{§§} |
| Gaa^{-/-} insertion 12847scfv:hGAA | 4.31 ± 0.87* | 3.47 ± 2.37 | 0.57 ± 0.26^{§§} | 0.141 ± 0.062^{§§} |
| Gaa^{-/-} insertion anti-CD63scfv:hGAA | 2.67 ± 1.04* | 0.93 ± 0.55* | 0.01 ± 0.003 | 0.060 ± 0.037 |

All values are arbitrary units, mean ± SD, n = 3-8 per group.
One Way ANOVA
*p < 0.05 vs. Gaa^{-/-} episomal AAV8 TTR 12847scfv:GAA group;
^{§§}p < 0.001 vs. AAV only negative control group.

TABLE 33
Quantification of glycogen in tissues of Gaa^{-/-}/Tfrc^{hum}
/^{hum} mice treated with insertion anti-hTFRC 12847scfv:hGAA

| Treatment group | Cerebrum | Quadricep |
|---|---|---|
| Wt untreated | 0.10 ± 0.07 | 0.37 ± 0.13 |
| Gaa^{-/-}/Tfrc^{hum} untreated (Tfrc^{hum}) | 2.76 ± 0.41 | 12.75 ± 1.88 |
| Gaa^{-/-}/Tfrc^{hum} insertion AAV only | 2.17 ± 0.40* | 10.64 ± 2.56 |
| Gaa^{-/-}/Tfrc^{hum} episomal AAV8 TTR 12847scfv:hGAA | 0.13 ± 0.03***^{§} | 2.44 ± 2.21***^{§} |
| Gaa^{-/-}/Tfrc^{hum} insertion 12847scfv:hGAA | 0.16 ± 0.05***^{§} | 1.67 ± 0.76***^{§} |
| Gaa^{-/-}/Cd63^{hum} untreated | 2.34 ± 0.30 | 11.91 ± 1.01 |
| Gaa^{-/-}/Cd63^{hum} insertion anti-CD63scfv:hGAA | 1.71 ± 0.20* | 4.06 ± 0.13** |

All values are glycogen ug/mg tissue, mean ± SD, n = 3-8 per group.
One Way ANOVA
*p < 0.01 vs. Gaa4-/Cd63^{hum} untreated group;
**p < 0.001 vs. Gaa^{-/-}/Cd63^{hum} untreated group;
***p < 0.0001 vs. Gaa^{-/-}/Tfrc^{hum}/^{hum} untreated group;
^{§}non-significant vs. Wt untreated group.

### Example 7. Anti-hTFRC:GAA Gene Insertion in Cynomolgus Monkeys

### mAb Clone IDs

[0727] H1H12847B in scfv:GAA format (REGN16826)
[0728] 12450NVH in scfv:GAA format (comparator, REGN5534)

### Insertion of Anti-hTFRC 12847Scfv:GAA in Cynomolgus Monkeys

[0729] We tested our lead anti-hTFRC 12847scfv:GAA in cynomolgus monkeys by albumin insertion to determine whether we could replicate the results we saw in mice. We compared 12847scfv:GAA to the muscle-targeted anti-hCD63scfv:GAA in cynomolgus monkeys. As shown in FIGS. 10-11, serum GAA activity corresponded to serum GAA protein levels. As shown in FIG. 11, albumin insertion of 12847scfv:GAA delivered mature hGAA protein to the brain (frontal cortex) and muscle (quadricep).

[0730] Albumin insertion of anti-hCD63scfv:GAA or 12847scfv:GAA resulted in similar serum GAA levels with two different gRNAs, regardless of what gRNA was used (data not shown). Insertion did not negatively affect serum iron panel or creatinine (data not shown).

### AAV Production

[0731] A promoterless AAV genome plasmid was created with the 12847scfv:GAA sequence and the mouse albumin exon 1 splice acceptor site at the 3′ end. Recombinant AAV8 (AAV2/8) was produced in HEK293 cells. Cells were transfected with three plasmids encoding adenovirus helper genes, AAV8 rep and cap genes, and recombinant AAV genomes containing transgenes flanked by AAV2 inverted terminal repeats (ITRs). On day 5, cells and medium were collected, centrifuged, and processed for AAV purification. Cell pellets were lysed by freeze-thaw and cleared by centrifugation. Processed cell lysates and medium were overlaid onto iodixanol gradients columns and centrifuged in an ultracentrifuge. Virus fractions were removed from the interface between the 40% and 60% iodixanol solutions and exchanged into 1×PBS with desalting columns. AAV vg were quantified by ddPCR.

In Vivo CRISPR1Cas9 Insertion into the Albumin Locus

[0732] Cynomolgus monkeys age 2-3 years were dosed intravenously with 1.5e13 vg/kg AAV8 12847scfv:GAA (or anti-CD63scfv:GAA) and 3 mg/kg LNP gRNA/Cas9 mRNA. Negative control monkeys received insertion AAV8 without LNP or vehicle control only. Serum and flash-frozen tissues were collected 90 days post-injection.

### GAA Activity in Serum: (FIG. 10)

[0733] Serum was collected prior to dosing and at indicated timepoints post-injection. GAA activity in the serum was quantified using Lysosomal alpha-Glucosidase Activity Assay Kit (Abcam ab252887). Serum GAA activity in CD63scfv:GAA and 12847scfv:GAA treated animals was above the vehicle controls and activity was similar between the treatment groups. Serum GAA activity corresponded with liver GAA protein expression and serum GAA protein levels (FIG. 11).

### Western Blot: (FIG. 11)

[0734] Tissue lysates were prepared by lysis in RIPA buffer with protease inhibitors (1861282, Thermo Fisher, Waltham, MA, USA). Tissue lysates were homogenized with a bead homogenizer (FastPrep5, MP Biomedicals, Santa Ana, CA, USA). Cells or tissue lysates were run on SDS-PAGE gels using the Novex system (LifeTech Thermo, XP04200BOX, LC2675, LC3675, LC2676). Gels were transferred to low-fluorescence polyvinylidene fluoridev (PVDF) membrane (IPFL07810, LI-COR, Lincoln, NE, USA) and stained with Revert 700 Total Protein Stain (TPS; 926-11010 LI-COR, Lincoln, NE, USA), followed by blocking with Odyssey blocking buffer (927-500000, LI-COR, Lincoln, NE, USA) in Tris buffer saline with 0.1% Tween 20 and staining with antibodies against GAA (ab137068, Abcam, Cambridge, MA, USA), or anti-GAPDH (ab9484, Abcam, Cambridge, MA, USA) and the appropriate secondary (926-32213 or 925-68070, LI-COR, Lincoln, NE, USA). Blots were imaged with a LI-COR Odyssey CLx.

[0735] Protein band intensity was quantified in LI-COR Image Studio software. The quantification of the mature 77 kDa GAA band for each sample was determined by normalizing to the lane's TPS signal (loading control).

### Example 8. Optimized Anti-TfR:GAA DNA Templates

[0736] Optimized anti-TfR:GAA templates were designed and generated. To select a development candidate, several versions of the four candidate anti-TfR:GAA insertion templates were generated in which the nucleotide sequence encoding the anti-TfR:GAA is modified (e.g., by depleting CpGs). Tables 34 and 35 list the different versions of anti-TfR:GAA inserts designed. Each of the anti-TfR:GAA inserts in Table 35 use the optimized GAA sequence set forth in SEQ ID NO: 649.

TABLE 34
Anti-TfR:GAA Inserts for Insertion Cassettes.

| Anti-TfR:GAA Insert | CpGs | SEQ ID NO (optimized GAA) |
|---|---|---|
| 12799 - DC | 0 | 651 |
| 12799 - GS | 0 | 652 |
| 12799 - 1^{st} generation | 160 | 648 |
| 12839 - DC | 0 | 653 |
| 12839 - GS | 0 | 654 |
| 12839 - 1^{st} generation | 163 | 648 |
| 12843 - DC | 0 | 655 |
| 12843 - GS | 0 | 656 |
| 12843 - 1^{st} generation | 160 | 648 |
| 12847 - DC | 0 | 657 |
| 12847 - GS | 0 | 658 |
| 12847 - 1^{st} generation | 160 | 648 |

TABLE 35
Anti-TfR:GAA Inserts for Insertion Cassettes.

| Anti-TfR:GAA Insert | CpGs in Transgene | SEQ ID NO |
|---|---|---|
| 12799 1^{st} generation | 160 | 659 |
| 12799 GA 0 | 0 | 663 |
| 12799 GS 0 | 0 | 664 |
| 12799 GS 0v2 | 0 | 665 |
| 12843 1^{st} generation | 160 | 661 |
| 12843 GA 0 | 0 | 666 |
| 12843 GS 0 | 0 | 667 |
| 12843 GS 0v2 | 0 | 668 |
| 12847 1^{st} generation | 160 | 662 |
| 12847 GA 0 | 0 | 669 |
| 12847 GS 0 | 0 | 670 |
| 12847 GS 0v2 | 0 | 671 |

[0737] Peripheral blood mononuclear cells (PBMCs) are isolated from human blood. Plasmacytoid dendritic cells (pDCs) are enriched and combined with pBMCs (1e4 pDCs+1e5 PBMCs per well). The cells are incubated for 16-18 hours with AAV or control CpG-oligodeoxynucleotides (ODNs). The supernatants are harvested, and an IFNα ELISA is performed. This assay assesses whether CpG-depleted anti-TfR:GAA sequences exhibit reduced IFN-I responses in a primary human plasmacytoid DC-based assay as compared to non-CpG-depleted sequences.

[0738] Activity of the various 12847 optimized anti-TfR:GAA templates (SEQ ID NOS: 675-678 or 669-671 (coding sequences)) and 12843 optimized anti-TfR:GAA templates (SEQ ID NOS: 672-674 or 666-668 (coding sequences)) was tested in a primary human hepatocyte assay. AAV templates were packaged into AAV2 viruses. Primary human hepatocytes were grown in 96-well plates and administered the AAV containing the template DNA and LNP-g9860 at fixed MOI (6e4) with LNP dose titration. Supernatants were collected 7 days post-dosing and stored at −80 degrees Celsius. Supernatants were thawed and GAA activity in the supernatants was measured using a 4-methylumbelliferone-based fluorometric assay (K690, BioVision, Milpitas, CA, USA) as a measurement of amount of enzymatically active GAA produced and secreted from the cells. As shown in FIGS. 19A-19B, all CpG-depleted anti-TfR:GAA templates exhibited increased GAA activity in primary human hepatocyte supernatant compared to the native anti-TfR:GAA templates.

[0739] Activity of the optimized templates is tested in a primary human hepatocyte assay. AAV templates are packaged into AAV2 viruses. Primary human hepatocytes are grown in 96-well plates and administered the AAV containing the template DNA and LNP-g9860 at fixed LNP concentration with AAV dose titration. Supernatants are collected 7 days post-dosing and stored at −80 degrees Celsius. Supernatants are thawed and GAA activity in the supernatants is measured using a 4-methylumbelliferone-based fluorometric assay (K690, BioVision, Milpitas, CA, USA) as a measurement of amount of enzymatically active GAA produced and secreted from the cells.

[0740] Activity of the 12847 scFv:GAA 0 CpG v0 optimized template (SEQ ID NO: 676 or 669 (coding sequence)) was then validated in the PD mouse model, Gaa^{-/-};Tfrc^{hu/hu} as described in Example 6. Three-month old mice (Gaa^{-/-};Tfrc^{hu/hu} mice and Gaa^{-/-};CD63^{hu/hu} mice) were dosed intravenously with 3 mg/kg LNP-g9860 and 3ev12 vg/kg AAV8 anti-TfR:GAA templates (native or 12847 0 CpG v0) and optimized anti-CD63:GAA template (GA 0 CpG anti-CD63:GAA template; SEQ ID NO: 679 or 650 (coding sequence)), respectively. Western blots for GAA (scFv:GAA and mature GAA) were done as in Example 6 and confirmed delivery of GAA to the brain (cerebrum) following albumin insertion of the native anti-TfR:GAA template or the 0 CpG anti-TfR:GAA template (FIG. 20A). Glycogen quantification in cerebrum, quadriceps, diaphragm, and heart was also done as in Example 6 and confirmed that albumin insertion of the 0 CpG anti-TfR:GAA templates retained TfR binding and GAA activity in vivo and that the CpG depleted sequence was as effective as the native sequence at rescuing the glycogen storage phenotype in Gaa^{-/-};Tfrc^{hu/hu} mice (FIG. 20B and Table 36).

TABLE 36
Quantification of glycogen in tissues of Gaa^{-/-}/Tfrc^{hum}
mice treated with anti-hTfRscfv:hGAA insertion templates.

| Treatment group | Cerebrum | Diaphragm | Heart | Quadricep |
|---|---|---|---|---|
| hTFRC Wt | 0.256 ± 0.175* | 2.44 ± 1.97* | 0.042 ± 0.022* | 0.724 ± 0.611* |
| hTFRC Gaa^{-/-} Untreated | 2.56 ± 0.237 | 17.54 ± 1.72 | 34.56 ± 6.36 | 7.96 ± 1.38 |
| hTFRC Gaa^{-/-} 12847:GAA native | 0.076 ± 0.022* | 1.30 ± 0.973* | 0.405 ± 0.351* | 1.48 ± 0.867* |
| hTFRC Gaa^{-/-} 12847:GAA 0 CpG | 0.114 ± 0.049* | 1.55 ± 1.60* | 0.35 ± .372* | 1.21 ± 0.821* |
| hCD63 Gaa^{-/-} Untreated | 2.39 ± 0.432 | 18.30 ± 2.62 | 30.88 ± 2.451 | 7.37 ± 1.134 |
| hCD63 Gaa^{-/-} CD63:GAA 0 CpG | 1.68 ± 0.220* | 0.544 ± 0.294* | 0.0634 ± 0.045* | 0.803 ± 0.297* |

All values are glycogen ug/mg tissue, mean ± SD, n = 5-8 per group.
One Way ANOVA
*p < 0.0001 vs. hTFRC Gaa^{-/-} Untreated group.

### Example 9. Epitope Mapping for Transferrin (TfR) Antibodies

[0741] Hydrogen-Deuterium Exchange Mass Spectrometry (HDX-MS) was performed to delineate regions in mouse and human Transferrin (m/hTfR) involved in binding of anti-Transferrin Receptor (TfR) antibodies. The anti-TfR monoclonal antibodies tested are described in Table 37. The reagents used and corresponding lot numbers are set forth in Table 38.

TABLE 37
Monoclonal Antibody Clones Tested

| REGN# | AbPID | Lot # |
|---|---|---|
| REGN17507 | H1H12798B | L1 |
| REGN17508 | H1H12799B | L1 |
| REGN17509 | H1H12835B | L1 |
| REGN17510 | H1H12839B | L1 |
| REGN17511 | H1H12841B | L1 |
| REGN17512 | H1H12843B | L1 |
| REGN17513 | H1H12845B | L1 |
| REGN17514 | H1H12847B | L1 |
| REGN17515 | H1H12848B | L1 |
| REGN17516 | H1H12850B | L1 |
| REGN17517 | H1H31874B | L1 |

TABLE 38
Reagents Used and Lot Numbers

| REGN# | Lot # | Description |
|---|---|---|
| REGN2120 | 03-121015 | hTfR(C89-F763).mmh |
| REGN2431 | L1 | hmm.hTfR(C89-F763) |

[0742] A general description of the HDX-MS method is set forth in, e.g., Ehring (1999) Analytical Biochemistry 267(2):252-259; and Engen and Smith (2001) Anal. Chem. 73:256A-265A. The experiment was performed on a customized HDX automation system (NovaBioAssays, MA) coupled to a Q Exactive HF mass spectrometer (Thermno Fisher Scientific, MA).

[0743] PBS-D₂O buffer was prepared by dissolving one PBS tablet in 100 mL 99.9% D₂O to form solution of 10 mM sodium phosphate, 137 mM NaCl, 3 mM KCl, pD 7.0 (equivalent to pH 7.4 at 25° C.). To initiate deuterium exchange, 10 μL of protein sample (hTfR alone, or hTfR in mixture with either of the monoclonal mAbs listed above, see, e.g., Table 37) was diluted with 90 μL PBS-D₂O buffer. After 5 minutes or 10 minutes, deuterium exchange was quenched by adding 100 μL quenching buffer (0.5 M TCEP, 4 M guanidine hydrochloride, pH 2.08) followed by 90 second incubation at 20° C. The quenched samples were digested by online pepsin/protease XIII column (NovaBioAssays, MA) at room temperature with 100 μL/min 0.1% formic acid in water. Peptic peptides were trapped by an ACQUITY UPLC Peptide BEH C18 VanGuard Pre-column (2.1×5 mm, Waters, MA) and further separated by an ACQUITY UPLC Peptide BEH C18 column (2.1×50 mm, Waters, MA) at −5° C., using 10-minute or 15-minute gradients with 0.1% formic acid in water and 0.1% formic acid in acetonitrile as mobile phases at 200 μL/min. Eluted peptides were analyzed by the mass spectrometer in LC-MS/MS or LC-MS mode.

[0744] A set of non-deuterated samples was prepared in PBS-H₂O buffer and analyzed with the method described above to identify peptide sequences and determine peptide masses without deuterium exchange. The LC-MS/MS data of non-deuterated samples were searched against a database containing sequences of hTfR, pepsin and protease XIII using the Byonic search engine (Protein Metrics, CA) with parameters for non-specific enzymatic digestion. The identified peptide list was then imported into the HDExaminer software (Sierra Analytics, CA) together with LC-MS data from all deuterated samples to calculate the deuterium uptake percentage (D %) of individual peptides from hTfR. Differences in deuterium uptake were calculated as AD %=D % of hTfR-mAb-D % of hTfR. Differences were considered significant if AD %<−5% (equivalent to |ΔD|>5% and ΔD %<0, averaged from 2 replicates). Mass spectra of peptides showing significant differences were examined manually to ensure that correct isotopic patterns were used for D % calculations by the software.

[0745] Two TfR protein constructs were used in HDX-MS experiments by reason of reagent availability and antibody specificity: hTfR(C89-F763).mmh, and hmm.hTfR(C89-F763). HDX data were obtained on 88%-95% of amino acids in hTfR with mmh tag. The numerical range provided before each amino acid sequence in the list below indicates the amino acid (aa) residue positions in hTfR which are protected by the indicated antibody. These amino acid residue positions are indicative of antibody binding sites on hTfR and does not provide residue-level contacts between them. Due to the nature of HDX-MS technique, the regions obtained by HDX-MS may be larger or smaller than actual contacts determined by high-resolution structural studies such as X-ray crystallography and cryogenic electron microscopy methods.

REGN17507 (H1H12798B) protects the following
regions in hTfR:
146-167
(SEQ ID NO: 704)
LLNENSYVPREAGSQKDENLAL;
281-295
(SEQ ID NO: 705)
IYMDQTKFPIVNAEL;
and
572-576
(SEQ ID NO: 706)
TYKEL.
REGN17508 (H1H12799B) protects the following
regions in hTfR:
128-146
(SEQ ID NO: 707)
KRKLSEKLDSTDFTGTIKL;
503-522
(SEQ ID NO: 708)
YTLIEKTMQNVKHPVTGQFL;
and
576-592
(SEQ ID NO: 709)
LIERIPELNKVARAAAE.
REGN17509 (H1H12835B) protects the following
region in hTfR:
147-165
(SEQ ID NO: 710)
LNENSYVPREAGSQKDENL.
REGN17510 (H1H12839B) protects the following
region in hTfR:
238-246
(SEQ ID NO: 711)
GTKKDFEDL.
REGN17511 (H1H12841B) protects the following
region in hTfR:
199-224
(SEQ ID NO: 712)
SVIIVDKNGRLVYLVENPGGYVAYSK.
REGN17512 (H1H12843B) protects the following
regions in hTfR:
146-164
(SEQ ID NO: 713)
LLNENSYVPREAGSQKDEN;
284-295
(SEQ ID NO: 714)
DQTKFPIVNAEL;
and
572-585
(SEQ ID NO: 715)
TYKELIERIPELNK.
REGN17513 (H1H12845B) protects the following
region in hTfR:
199-222
(SEQ ID NO: 716)
SVIIVDKNGRLVYLVENPGGYVAY.
REGN17514 (H1H12847B) protects the following
regions in hTfR:
146-164
(SEQ ID NO: 713)
LLNENSYVPREAGSQKDEN;
and
572-585
(SEQ ID NO: 715)
TYKELIERIPELNK.
REGN17515 (H1H12848B) protects the following
regions in hTfR:
281-295
(SEQ ID NO: 705)
IYMDQTKFPIVNAEL;
and
346-365
(SEQ ID NO: 717)
FGNMEGDCPSDWKTDSTCRM.
REGN17516 (H1H12850B) protects the following
regions in hTfR:
146-167
(SEQ ID NO: 704)
LLNENSYVPREAGSQKDENLAL;
212-232
(SEQ ID NO: 719)
LVENPGGYVAYSKAATVTGKL;
281-297
(SEQ ID NO: 720)
IYMDQTKFPIVNAELSF;
337-345
(SEQ ID NO: 721)
ISRAAAEKL;
366-383
(SEQ ID NO: 722)
VTSESKNVKLTVSNVLKE;
and
557-572
(SEQ ID NO: 723)
FCEDTDYPYLGTTMDT
REGN17517 (H1H31874B) protects the following
region in hTfR:
243-246
(SEQ ID NO: 718)
FEDL.

[0746] The minimal amino acid sequence in hTfR which is protected by the above-listed anti-TfR antibodies (i.e., the minimal epitope sequence), numerical range indicating the amino acid (aa) residue positions in hTfR which are protected each antibody, as well as the conformational or linear nature of each minimal epitope are described in Table 39. Each of the minimal epitopes is bound by its corresponding antibody at one or more amino acid residues within the minimal epitope sequence.

TABLE 39
Minimal epitope sequences in hTfR protected by
anti-TfR antibodies.

| | | | Amino | | |
|---|---|---|---|---|---|
| | Epi- | | acid | Amino | SEQ |
| Antibody | tope | | residue | acid | ID |
| ID | No. | Class | positions | sequence | NO |
| REGN17507 | 1 | conforma- | 146-149 | LLNE | 752 |
| (H1H12798B) | | tional | | | |
| REGN17507 | 2 | conforma- | 572-576 | TYKEL | 706 |
| (H1H12798B) | | tional | | | |
| REGN17508 | 1 | conforma- | 136-143 | DSTDFTGT | 753 |
| (H1H12799B) | | tional | | | |
| REGN17508 | 2 | conforma- | 513-521 | VKHPVTGQF | 754 |
| (H1H12799B) | | tional | | | |
| REGN17508 | 3 | conforma- | 577-583 | IERIPEL | 755 |
| (H1H12799B) | | tional | | | |
| REGN17509 | 1 | linear | 147-164 | LNENSYVPREA | 756 |
| (H1H12835B) | | | | GSQKDEN | |
| REGN17510 | 1 | linear | 243-246 | FEDL | 718 |
| (H1H12839B) | | | | | |
| REGN17511 | 1 | linear | 202-209 | IVDKNGRL | 757 |
| (H1H12841B) | | | | | |
| REGN17512 | 1 | conforma- | 146-149 | LLNE | 752 |
| (H1H12843B) | | tional | | | |
| REGN17512 | 2 | conforma- | 572-576 | TYKEL | 706 |
| (H1H12843B) | | tional | | | |
| REGN17513 | 1 | linear | 202-211 | IVDKNGRLVY | 758 |
| (H1H12845B) | | | | | |
| REGN17514 | 1 | conforma- | 146-149 | LLNE | 752 |
| (H1H12847B) | | tional | | | |
| REGN17514 | 2 | conforma- | 572-576 | TYKEL | 706 |
| (H1H12847B) | | tional | | | |
| REGN17515 | 1 | linear | 284-288 | DQTKF | 759 |
| (H1H12848B) | | | | | |
| REGN17516 | 1 | conforma- | 212-218 | LVENPGGY | 760 |
| (H1H12850B) | | tional | | | |
| REGN17516 | 2 | conforma- | 289-297 | PIVNAELSF | 761 |
| (H1H12850B) | | tional | | | |
| REGN17516 | 3 | conforma- | 564-572 | PYLGTTMDT | 762 |
| (H1H12850B) | | tional | | | |
| REGN17517 | 1 | linear | 243-246 | FEDL | 718 |
| (H1H31874B) | | | | | |

[0747] The extracellular unit of hTfR is structurally categorized into three domains, the helical, protease-like and apical domains (PDB 1SUV).

[0748] Structural studies of TfR in complex with a variety of molecules that have identified TfR binding sites, including Mammarenavirus machupoense GP1 protein (PDB 3KAS), canine parvovirus (PDB 2NSU), human ferritin (PDB 6GSR), plasmodium vivax Sal-1 PvRBP2b (PDB 6D04), human HFE protein (PDB 1DE4), human transferrin (PDB 1SUV), etc. FIG. 12 shows the interactions of the above-listed molecules superimposed on a single TfR molecule.

[0749] HDX protections for the antibodies tested in HDX-MS experiments can be assigned to 5 regions in TfR (PDB 1SUV) as depicted in FIG. 13.

[0750] Tabulated summaries of data of the present Example are described in Table 40 to Table 44. FIGS. 14-18 correspond to the tables below.

TABLE 40
Antibodies that show HDX protections in TfR
apical domain and overlap with Mammarenavirus
machupoense GP1, canine parvovirus, human
ferritin, and plasmodium vivax Sal-1 PvRBP2b
binding sites.

| | | | m/hTfR | |
|---|---|---|---|---|
| | | | residues | |
| | | | with | |
| | | | significant | |
| | | | changes in | Sequence |
| Antibody | REGN# | Antigen | deuterium % | coverage |
| H1H12841B | REGN17511 | hTfR.mmh | 199-224 | ~92.9% |
| | | | SVIIVDKNGRLVY | |
| | | | LVENPGGYVAYSK | |
| | | | (SEQ ID | |
| | | | NO: 712) | |
| H1H12845B | REGN17513 | hmm.hTfR | 199-222 | ~88.1% |
| | | | SVIIVDKNGRLVY | |
| | | | LVENPGGYVAY | |
| | | | (SEQ ID | |
| | | | NO: 716) | |

TABLE 41
Antibodies with HDX protections in TfR
apical domain that are not shared by
other TfR binding partners listed in
Table 40.

| | | | m/hTfR | |
|---|---|---|---|---|
| | | | residues | |
| | | | with | |
| | | | significant | |
| | | | changes in | Sequence |
| Antibody | REGN# | Antigen | deuterium % | coverage |
| H1H31874B | REGN17517 | hTfR.mmh | 243-246 | ~92.9% |
| | | | FEDL | |
| | | | (SEQ ID | |
| | | | NO: 718) | |
| H1H12839B | REGN17510 | hmm.hTfR | 238-246 | ~88.3% |
| | | | GTKKDFEDL | |
| | | | (SEQ ID | |
| | | | NO: 711) | |

TABLE 42
Antibodies with HDX protections in TfR apical
domain that share binding sites with human
ferritin and plasmodium vivax Sal-1 PvRBP2b.

| | | | m/hTfR | |
|---|---|---|---|---|
| | | | residues | |
| | | | with | |
| | | | significant | |
| | | | changes in | Sequence |
| Antibody | REGN# | Antigen | deuterium % | coverage |
| H1H12848B | REGN17515 | hTfR.mmh | 281-295 | ~92.9% |
| | | | IYMDQTKFPIV | |
| | | | NAEL | |
| | | | (SEQ ID | |
| | | | NO: 705) | |
| | | | 346-365 | |
| | | | FGNMEGDCPSD | |
| | | | WKTDSTCRM | |
| | | | (SEQ ID | |
| | | | NO: 717) | |
| H1H12850B | REGN17516 | hTfR.mmh | 146-167 | ~92.9% |
| | | | LLNENSYVPRE | |
| | | | AGSQKDENLAL | |
| | | | (SEQ ID | |
| | | | NO: 704) | |
| | | | 212-232 | |
| | | | LVENPGGYVAY | |
| | | | SKAATVTGKL | |
| | | | (SEQ ID | |
| | | | NO: 719) | |
| | | | 281-297 | |
| | | | IYMDQTKFPIV | |
| | | | NAELSF | |
| | | | (SEQ ID | |
| | | | NO: 720) | |
| | | | 337-345 | |
| | | | ISRAAAEKL | |
| | | | (SEQ ID | |
| | | | NO: 721) | |
| | | | 366-383 | |
| | | | VTSESKNVKLT | |
| | | | VSNVLKE | |
| | | | (SEQ ID | |
| | | | NO: 722) | |
| | | | 557-572 | |
| | | | FCEDTDYPYLG | |
| | | | TTMDT | |
| | | | (SEQ ID | |
| | | | NO: 723) | |

TABLE 43
Antibodies with HDX protections in TfR
protease-like domain and share binding
sites with plasmodium vivax Sal-1 PvRBP2b.

| | | | m/hTfR | |
|---|---|---|---|---|
| | | | residues | |
| | | | with | |
| | | | significant | |
| | | | changes in | Sequence |
| Antibody | REGN# | Antigen | deuterium % | coverage |
| H1H12798B | REGN17507 | hmm.hTfR | 146-167 | ~87.0% |
| | | | LLNENSYVPREA | |
| | | | GSQKDENLAL | |
| | | | (SEQ ID | |
| | | | NO: 704) | |
| | | | 281-295 | |
| | | | IYMDQTKFPIVN | |
| | | | AEL | |
| | | | (SEQ ID | |
| | | | NO: 705) | |
| | | | 572-576 | |
| | | | TYKEL | |
| | | | (SEQ ID | |
| | | | NO: 706) | |
| H1H12843B | REGN17512 | hmm.hTfR | 146-164 | ~88.3% |
| | | | LLNENSYVPREA | |
| | | | GSQKDEN | |
| | | | (SEQ ID | |
| | | | NO: 713) | |
| | | | 284-295 | |
| | | | DQTKFPIVNAEL | |
| | | | (SEQ ID | |
| | | | NO: 714) | |
| | | | 572-585 | |
| | | | TYKELIERIPEL | |
| | | | NK | |
| | | | (SEQ ID | |
| | | | NO: 715) | |
| H1H12847B | REGN17514 | hmm.hTfR | 146-164 | ~88.1% |
| | | | LLNENSYVPREA | |
| | | | GSQKDEN | |
| | | | (SEQ ID | |
| | | | NO: 713) | |
| | | | 572-585 | |
| | | | TYKELIERIPEL | |
| | | | NK | |
| | | | (SEQ ID | |
| | | | NO: 715) | |
| H1H12835B | REGN17509 | hTfR.mmh | 147-165 | ~92.9% |
| | | | LNENSYVPREA | |
| | | | GSQKDENL | |
| | | | (SEQ ID | |
| | | | NO: 710) | |

TABLE 44
Antibodies with HDX protections in TfR
protease-like domain. This region is
not utilized by other TfR interacting
molecules listed in Table 43.

| | | | m/hTfR | |
|---|---|---|---|---|
| | | | residues | |
| | | | with | |
| | | | significant | |
| | | | changes in | Sequence |
| Antibody | REGN# | Antigen | deuterium % | coverage |
| H1H12799B | REGN17508 | hmm.hTfR | 128-146 | ~88.7% |
| | | | KRKLSEKLDSTD | |
| | | | FTGTIKL | |
| | | | (SEQ ID | |
| | | | NO: 707) | |
| | | | 503-522 | |
| | | | YTLIEKTMQNVK | |
| | | | HPVTGQFL | |
| | | | (SEQ ID | |
| | | | NO: 708) | |
| | | | 576-592 | |
| | | | LIERIPELNKVAR | |
| | | | AAAE | |
| | | | (SEQ ID | |
| | | | NO: 709) | |

### REFERENCES

[0751] 1. Ehring (1999) Analytical Biochemistry 267(2):252-259
[0752] 2. Engen and Smith (2001) Anal. Chem. 73:256A-265A

### Example 10. Development of System for Insertion into Albumin Locus in Liver

[0753] Based on proof-of-concept with the anti-TfR:GAA transgenes and optimized anti-TfR:GAA insertion templates, a similar system for nuclease-mediated insertion (e.g., CRISPR/Cas) of an anti-TfR:ASM transgene into a specific locus (e.g., albumin intron 1) using the same materials other than the insertion templates was developed to produce durable expression of the anti-TfR:ASM transgene. Exemplary components of the system, including those used in subsequent examples, are described in more detail below.

[0754] A lipid nanoparticle (LNP) system will be used for nuclease-mediated insertion (e.g., CRISPR/Cas) into a specific locus (e.g., albumin intron 1) in combination with an adeno-associated virus (AAV) insertion template to allow for robust, continuous therapeutic protein secretion in circulation. In this context, we aim to use a combination of LNP for CRISPR/Cas insertion into the albumin locus plus an rAAV8 capsid to express a BBB-crossing antibody-guided therapeutic in the liver in order to have continuous secretion of this therapeutic in circulation within an insertion template. The CRISPR/Cas system in this case will target the ALB gene or locus and will be comprised of a Cas protein (or a nucleic acid encoding the Cas protein) and one or more guide RNAs (or DNAs encoding the one or more guide RNAs), with each of the one or more guide RNAs targeting a different guide RNA target sequence in the target genomic locus. The design of the insertion template for this treatment will be intact ASM enzyme fused to an antibody that binds Transferrin Receptor C (TfRC). The N-terminus of the ASM enzyme will be fused to the TfRC antibody C-terminus leaving its own C-terminus free to interact with sortilin, prosaposin, and other receptors key for uptake and lysosomal delivery of ASM which is essential to achieve the desired functionality of the protein. The TfRC antibody recognizes TfRC on the vasculature of the blood-brain barrier, causing transfer of the ASM-TfRC-Ab fusion into the brain. Preclinical evidence suggests that bringing functional ASM protein across the BBB is sufficient for it to reach all relevant cell types, get internalized by these cells, and reach the lysosome to undergo proteolytic cleavage and achieve all needed functionality for efficacy.

### Single Guide RNA Design and Selection

[0755] The ALB locus was selected as the insertion site for the DNA templates. A list of single guide RNAs (sgRNAs) was generated that target human ALB intron 1. See Table 45. Candidate sgRNAs were synthesized and formulated into lipid nanoparticles (LNPs) with Cas9 mRNA for evaluation in vitro and in vivo.

TABLE 45
Human ALB Intron 1 Guide RNAs.

| Guide | SEQ ID NO (DNA- | SEQ ID NO | SEQ ID NO | SEQ ID NO (Guide RNA |
|---|---|---|---|---|
| RNA | Targeting Segment) | (Unmodified sgRNA) | (Modified sgRNA) | Target Sequence) |
| G009844 | 30 | 62 | 94 | 126 |
| G009851 | 31 | 63 | 95 | 127 |
| G009852 | 32 | 64 | 96 | 128 |
| G009857 | 33 | 65 | 97 | 129 |
| G009858 | 34 | 66 | 98 | 130 |
| G009859 | 35 | 67 | 99 | 131 |
| G009860 | 36 | 68 | 100 | 132 |
| G009861 | 37 | 69 | 101 | 133 |
| G009866 | 38 | 70 | 102 | 134 |
| G009867 | 39 | 71 | 103 | 135 |
| G009868 | 40 | 72 | 104 | 136 |
| G009874 | 41 | 73 | 105 | 137 |
| G012747 | 42 | 74 | 106 | 138 |
| G012748 | 43 | 75 | 107 | 139 |
| G012749 | 44 | 76 | 108 | 140 |
| G012750 | 45 | 77 | 109 | 141 |
| G012751 | 46 | 78 | 110 | 142 |
| G012752 | 47 | 79 | 111 | 143 |
| G012753 | 48 | 80 | 112 | 144 |
| G012754 | 49 | 81 | 113 | 145 |
| G012755 | 50 | 82 | 114 | 146 |
| G012756 | 51 | 83 | 115 | 147 |
| G012757 | 52 | 84 | 116 | 148 |
| G012758 | 53 | 85 | 117 | 149 |
| G012759 | 54 | 86 | 118 | 150 |
| G012760 | 55 | 87 | 119 | 151 |
| G012761 | 56 | 88 | 120 | 152 |
| G012762 | 57 | 89 | 121 | 153 |
| G012763 | 58 | 90 | 122 | 154 |
| G012764 | 59 | 91 | 123 | 155 |
| G012765 | 60 | 92 | 124 | 156 |
| G012766 | 61 | 93 | 125 | 157 |

[0756] LNPs were first screened in primary human hepatocytes (PHH) using a bidirectional nanoluc-encoding AAV insertion template as a reporter. LNPs that supported targeted insertion of nanoluc were identified by measuring nanoluc protein secreted into the supernatant of PHH cultures. Candidates that passed initial PHH screening were then tested for their ability to support in vivo gene insertion. Top candidates from in vivo studies were functionally evaluated for off-target cutting.

[0757] As with the anti-TfR:GAA insertion examples above, LNP-g9860, which is formulated with ALB-targeting sgRNA 9860, described in more detail below, was selected based on supporting robust transgene expression levels across multiple platforms (primary human and non-human primate hepatocytes, ALB humanized mice, and non-human primates), lack of confirmed off-target sites, translation across species, lack of common human SNPs in the target site, low variability of transgene expression within groups, and performance across a dose range. The target site of sgRNA 9860 is conserved in cynomolgus monkeys. LNP-g9860 had no detectable off-target sites in the human genome (targeted amplicon sequencing performed in two lots of primary human hepatocytes at saturating levels of editing failed to validate any locus other than on-target at ALB) and supported transgene expression via insertion in primary human and non-human primate hepatocytes, ALB humanized mice, and non-human primates.

### LNP-g9860

[0758] LNP-g9860 was developed for use in targeting human ALB intron 1. LNP-g9860 is a lipid nanoparticle that includes a sgRNA of 100 nucleotides in length (g9860) and Cas9-encoding mRNA, each of which is described further below, encapsulated in an LNP comprised of four different lipids. The Cas9 protein, expressed from the Cas9 mRNA, is directed to cleave the DNA when sgRNA 9860 binds to the targeted complementary DNA sequence associated with a PAM. The composition of the LNP is summarized in Table 46. LNP-g9860 comprises four lipids at the following molar ratios: 50 mol % Lipid A, 9 mol % DSPC, 38 mol % cholesterol, and 3 mol % PEG2k-DMG and is formulated in aqueous buffer composed of 50 mM Tris-HCl, 45 mM NaCl, 5% (w/v) sucrose, at pH 7.4. The N:P ratio is about 6, and the gRNA:Cas9 mRNA ratio is about 1:2 by weight.

TABLE 46
Lipid Nanoparticle (LNP-g9860) Composition.

| Component | Description |
|---|---|
| Active Pharmaceutical Components | Cas9 mRNA |
| | sgRNA (gRNA9860) |
| Lipid Excipients | Lipid A: (9Z,12Z)-3-((4,4- |
| | bis(octyloxy)butanoyl)oxy)-2-((((3- |
| | (diethylamino)propoxy)carbonyl)oxy)methyl)propyl |
| | octadeca-9,12-dienoate |
| | Cholesterol |
| | DSPC |
| | PEG2K-DMG |
| Other Excipients | Tris, NaCl, Sucrose |
| | WFI |

[0759] Single guide RNA. The single guide RNA (sgRNA 9860) used in LNP-g9860 is a 100-mer oligonucleotide containing a 20-nucleotide sequence that is complementary to the target region in intron 1 of the human ALB gene. The target sequence recognized by g9860 is conserved in the cynomolgus monkey mfAlb gene intron 1. The sequence for g9860 is set forth in SEQ ID Nos: 68 and 100. Chemical modifications are incorporated into the 100-mer during synthesis, which include phosphorothioate (PS) linkages at the 5′- and 3′-end of the sgRNA and 2′—O-methyl modifications to some of the sugars of the RNA.

[0760] Cas9 mRNA. As in the anti-TfR:GAA insertion examples above, the Cas9 messenger RNA (mRNA) used in LNP-g9860 is based on the Cas9 protein sequence from Streptococcus pyogenes. The Cas9-encoding mRNA (SEQ ID NO: 1, with a coding sequence (CDS) set forth in SEQ ID NO: 2), is approximately 4400 nucleotides in length. The sequence contains a 5′ cap, a 5′ untranslated region (UTR), an open reading frame (ORF) encoding the Cas9 protein, a 3′ UTR, and a polyA tail. The 5′ cap is generated co-transcriptionally by use of a synthetic cap analogue structure, known as anti-reverse cap analogue (ARCA). The uracils in the mRNA sequence have been completely replaced by a modified N¹ methylpseudouridine during the in vitro transcription. The 5′ end of the mRNA has a synthetic cap analog structure. The poly-A tail is approximately 100 nucleotides.

### Lnp-g666

[0761] As in the anti-TfR:GAA insertion examples above, LNP-g666 was developed for use in targeting mouse Alb intron 1. LNP-g666 is the same as LNP-g9860, except human-albumin-targeting g9860 is replaced with g666, a guide RNA targeting mouse albumin intron 1. The sequence for g666 is set forth in SEQ ID NOS: 166 and 167.

rAAV8 Vector

[0762] As in the anti-TfR:GAA insertion examples above, a recombinant AAV8 (rAAV8) vector was developed to carry the DNA insertion templates. The rAAV8 vector carrying the DNA insertion templates is a non-replicating vector that is an AAV-based vector derived from AAV serotype 8. The genome is a single-stranded deoxyribonucleic acid (DNA), comprising inverted terminal repeats (ITR) at each end. The ITRs flank the promoterless insertion template. The AAV ITRs flanking the cassette were derived from AAV2. The DNA insertion templates delivered by rAAV8 vector can be designed as promoterless templates, thus relying on the targeted ALB locus promoter for expression.

### Example 11. Development of Reagents for Treatment of Acid Sphingomyelinase Deficiency (ASMD

[0763] A system for nuclease-mediated insertion (e.g., CRISPR/Cas) of an anti-TfR:ASM transgene into a specific locus (e.g., albumin intron 1) was developed to produce durable expression of anti-TfR:ASM. The anti-TfR:ASM proteins can also be used for enzyme replacement therapy, or the nucleic acid constructs can be used for gene therapy without insertion (e.g., expressed from an episomal AAV vector, such as in the liver)

[0764] Exemplary components of the system for anti-TfR:ASM, including those used in subsequent examples, are described in more detail below. See FIGS. 21-22. The anti-TfR:ASM DNA templates in the working examples described below are brought into the liver by a recombinant AAV8 vector, and the CRISPR/Cas9 RNA components (Cas9 mRNA and sgRNA) are delivered to the liver by LNP-mediated delivery (FIGS. 21-22). The anti-TfR:ASM protein produced by the liver is targeted to the CNS by targeting TfR, which is expressed in muscle and on brain endothelial cells. Transcytosis of TfR in these cells enables blood-brain-barrier crossing. Single guide RNA, LNP-g9860, Cas9 mRNA, and LNP-g666 design and selection were as described in Example 10.

### DNA Template Design and Selection

[0765] DNA templates for insertion of a nucleic encoding anti-TfR:ASM fusions are engineered in which the C-terminus of a single-chain fragment variable (scFv) is fused to the N-terminus of amino acids 62-631 of ASM with a glycine-serine linker, or in which the C-terminus of ASM (62-631) is fused to a scFv. The ASM (62-631) sequence is set forth in SEQ ID NO: 733 and is encoded by the sequence set forth in SEQ ID NO: 732. A splice acceptor site is encoded upstream of the anti-TfR:ASM or ASM:anti-TfR transgene, and a polyadenylation sequence is encoded downstream of the transgene.

rAAV8 Vector

[0766] A recombinant AAV8 (rAAV8) vector is developed to carry the DNA insertion templates. The rAAV8 vector carrying the anti-TfR:ASM DNA template is a non-replicating vector that is an AAV-based vector derived from AAV serotype 8. The genome is a single-stranded deoxyribonucleic acid (DNA), comprising inverted terminal repeats (ITR) at each end. The ITRs flank the anti-TfR:ASM promoterless insertion template. The AAV ITRs flanking the cassette are derived from AAV2. The anti-TfR:ASM DNA template delivered by rAAV8 vector is designed as a promoterless template, thus relying on the targeted ALB locus promoter for expression.

[0767] A recombinant AAV8 (rAAV8) vector is developed to carry the episomal expression templates. The rAAV8 vector carrying the anti-TfR:ASM DNA template is a non-replicating vector that is an AAV-based vector derived from AAV serotype 8. The genome is a single-stranded deoxyribonucleic acid (DNA), comprising inverted terminal repeats (ITR) at each end. The ITRs flank the anti-TfR:ASM DNA template operably linked to a promoter active in liver cells, such as a TTR promoter. The AAV ITRs flanking the cassette are derived from AAV2.

### Example 12. Anti-TFRC:ASM Gene Therapy

[0768] Several anti-TfR:ASM plasmid and AAV nucleic acid constructs were generated a shown in Table 47.

TABLE 47
Anti-TfR:ASM nucleic acid constructs.

| Construct | Elements |
|---|---|
| Plasmid native human ASM (SEQ | pCMV-hASM-SV40pA |
| ID NO: 748) | |
| Plasmid mROR-ASM (SEQ ID | pCMV-mRORss-hASM(47-631)-SV40pA |
| NO: 749) | |
| Plasmid ASM:12847scfv (SEQ ID | pCMV-mRORss-hASM(62-631)-G4S-12847scfv-SV40pA |
| NO: 750) | |
| Plasmid 12847scfv:ASM (SEQ ID | pCMV-mRORss-12847scfv-G4S-hASM(62-631)-SV40pA |
| NO: 751) | |
| pAAV-hAAT native human ASM | ITR141-pAAT-hASM-SV40pA-ITR141 |
| (SEQ ID NO: 740) | |
| pAAV-hAAT mROR-ASM (SEQ | ITR141-pAAT-mRORss-hASM(62-631)-SV40pA-ITR141 |
| ID NO: 741) | |
| pAAV-hAAT mROR- | ITR141-pAAT-mRORss-hASM(62-631)-G4S-12847scfv-SV40pA-ITR141 |
| ASM:12847scfv (SEQ ID NO: | |
| 742) | |
| pAAV-hAAT mROR- | ITR141-pAAT-mRORss-12847scfv-G4S-hASM(62-631)-SV40pA-ITR141 |
| 12847scfv:ASM (SEQ ID NO: | |
| 743) | |
| pAAV TTR native human ASM | ITR141-pTTR-hASM-SV40pA-ITR141 |
| (SEQ ID NO: 744) | |
| pAAV TTR mROR-ASM (SEQ ID | ITR141-pTTR-mRORss-hASM(47-631)-SV40pA-ITR141 |
| NO: 745) | |
| pAAV TTR mROR- | ITR141-pTTR-mRORss-hASM(62-631)-G4S-12847scfv-SV40pA-ITR141 |
| ASM:12847scfv (SEQ ID NO: | |
| 746) | |
| pAAV TTR mROR- | ITR141-pTTR-mRORss-12847scfv-G4S-hASM(62-631)-SV40pA-ITR141 |
| 12847scfv:ASM (SEQ ID NO: | |
| 747) | |

pCMV = CMV promoter (SEQ ID NO: 724)
pAAT = ApoE enhancer = human AAT promoter + HBB2 intron (SEQ ID NO: 725)
pTTR = mouse serpinA1 enhancer + mouse TTR promoter (SEQ ID NO: 726)
mRORss = mouse ROR signal peptide coding sequence (SEQ ID NO: 727, encoding SEQ ID NO: 610)
G4S = G4S linker coding sequence (SEQ ID NO: 623, encoding SEQ ID NO: 537)
SV40pA = SV40 polyA (SEQ ID NO: 169)
ITR141 (SEQ ID NO: 159; reverse complement SEQ ID NO: 613)
12847scfv (SEQ ID NO: 536, encoding SEQ ID NO: 508)
hASM = human acid sphingomyelinase (hASM) coding sequence (SEQ ID NO: 730, encoding SEQ ID NO: 728)
hASM(62-631) = coding sequence for amino acids 62-631 of hASM (SEQ ID NO: 732, encoding SEQ ID NO: 733)
hASM(47-631) = coding sequence for amino acids 47-631 of hASM (SEQ ID NO: 734 or 735, encoding SEQ ID
NO: 731)

[0769] To validate that the AAV constructs express stable anti-TfR:ASM in vitro, Huh-7 hepatocytes were transiently transfected (Mirus Trans-IT LT1 MIR 2300 according to manufacturer protocol) with indicated anti-TfR1:ASM fusion protein plasmids under the liver-specific TTR or hAAT promoters. Media supernatants were collected 72 hours post-transfection and run on SDS-PAGE gels using the Novex system (LifeTech Thermo, XPO4200BOX, LC2675, LC3675, LC2676). Gels were transferred to low-fluorescence polyvinylidene fluoridev (PVDF) membrane (IPFL07810, LI-COR, Lincoln, NE, USA) and stained with Revert 700 Total Protein Stain (TPS; 926-11010 LI-COR, Lincoln, NE, USA), followed by blocking with Odyssey blocking buffer (927-500000, LI-COR, Lincoln, NE, USA) in Tris buffer saline with 0.1% Tween 20 and staining with rabbit antibody against ASM (Origene custom service antibody production), or anti-GAPDH (ab9484, Abcam, Cambridge, MA, USA) and the appropriate secondary (926-32213 or 925-68070, LI-COR, Lincoln, NE, USA). Blots were imaged with a LI-COR Odyssey CLx. TfR1-targeted ASM protein expression levels were comparable to untargeted ASM. See FIG. 23.

[0770] To show that the anti-TfR:ASM fusion proteins retain sphingomyelinase activity in vitro, HEK293 cells were transiently transfected (Mirus Trans-IT LT1 MIR 2300 according to manufacturer protocol) with indicated anti-TfR1:ASM fusion protein plasmids under the CMV promoter. Cells were lysed in assay buffer (1 M ZnCl₂ pH 6.5) with protease inhibitors (Thermo Scientific 78440). Samples were incubated in 96-well plate with 1 mM substrate 2NHexadecanoyl-4-nitrophenylphosphorylcholine (HNPPC, Sigma-Aldrich 5048590001) in assay buffer for 1 hour at 37° C. The reaction was quenched with 0.1 NaOH and absorbance quantified at 410 nm on a Molecular Devices Spectramax i3 plate reader. Activity was calculated compared to p-Nitrophenol standards, using the following formula: Specific Activity (pmol/min/ug)=Adjusted Abs*(OD)×Conversion factor**(pmol/OD)/Incubation time (min)×amount of enzyme (ug). TfR1:ASM fusion proteins retained normal ASM activity compared to native, untargeted ASM. See FIG. 24.

[0771] To validate expression, secretion, and BBB crossing of anti-TfR:ASM fusion proteins in vivo, Tfrc humanized mice were injected via tail vein with 50 μg of pAAV plasmid expressing TfR1scfv:ASM or ASM:TfR1scfv (antibody clone 12847) under the hAAT promoter in saline at a volume of 10% of the animal's body weight. Delivering plasmid in this volume temporarily reverses blood flow in the liver and forces the plasmid into hepatocytes for expression. Expressed proteins are secreted into the serum and delivered to tissues via antibody-mediated endocytosis. Serum and tissues were harvested from mice 48 hours post-injection and flash-frozen. Tissue lysates were prepared by lysis in RIPA buffer with protease inhibitors (Thermo Scientific 78440). Tissue lysates were homogenized with a bead homogenizer (FastPrep5, MP Biomedicals, Santa Ana, CA, USA). Serum or tissue lysates were run on SDS-PAGE gels using the Novex system (LifeTech Thermo, XPO4200BOX, LC2675, LC3675, LC2676). Gels were transferred to low-fluorescence polyvinylidene fluoridev (PVDF) membrane (IPFL07810, LI-COR, Lincoln, NE, USA) and stained with Revert 700 Total Protein Stain (TPS; 926-11010 LI-COR, Lincoln, NE, USA), followed by blocking with Odyssey blocking buffer (927-500000, LI-COR, Lincoln, NE, USA) in Tris buffer saline with 0.1% Tween 20 and staining with rabbit antibody against ASM (Origene custom service antibody production), or anti-GAPDH (ab9484, Abcam, Cambridge, MA, USA) and the appropriate secondary (926-32213 or 925-68070, LI-COR, Lincoln, NE, USA). Blots were imaged with a LI-COR Odyssey CLx. The blot image in FIG. 25 shows that TfR1scfv:ASM and ASM:TfR1scfv are expressed in the liver and secreted into the serum, and detected in the brain homogenate at levels above vehicle-treated animals.

### AAV8 Episomal Liver Depot Expression of TfR:ASM

[0772] Four-month old Smpd1^{-/-} mice were treated with 5e12 vg/kg of AAV8 expressing either mROR-ASM, 12847scfv:ASM, or ASM:12847scfv under the TTR promoter. Four weeks post-injection, mice are euthanized and perfused with saline via transcardial perfusion, and tissues are harvested and snap frozen in LN2. Western blot is performed on tissues by running on SDS-PAGE gels using the Novex system (LifeTech Thermo, XPO4200BOX, LC2675, LC3675, LC2676). Gels are transferred to low-fluorescence polyvinylidene fluoridev (PVDF) membrane (IPFL07810, LI-COR, Lincoln, NE, USA) and are stained with Revert 700 Total Protein Stain (TPS; 926-11010 LI-COR, Lincoln, NE, USA), followed by blocking with Odyssey blocking buffer (927-500000, LI-COR, Lincoln, NE, USA) in Tris buffer saline with 0.1% Tween 20 and staining with rabbit antibody against ASM (Origene custom service antibody production), or anti-GAPDH (ab9484, Abcam, Cambridge, MA, USA) and the appropriate secondary (926-32213 or 925-68070, LI-COR, Lincoln, NE, USA). Blots will be imaged with a LI-COR Odyssey CLx. Sphingomyelin lipid in tissues are also quantified using the Sphingomyelin Assay Kit (Abcam ab133118). We anticipate that 12847scfv:ASM and ASM:12847scfv will have increased delivery to target tissues compared to untargeted mROR-ASM. We anticipate that brain and spinal cord sphingomyelin lipid will be decreased in Smpd1^{-/-} mice treated with 12847scfv:ASM and ASM:12847scfv.

### Liver Albumin Insertion of TfR:ASM

[0773] Three-month old Smpd1^{-/-} mice are treated with 3 mg/kg LNP (g666/Cas9 mRNA) and 3e12 vg/kg of AAV8 delivering either mROR-ASM, 12847scfv:ASM, or ASM:12847scfv for insertion into the albumin locus. Four weeks post-injection, mice are euthanized, are perfused with saline via transcardial perfusion, and tissues are harvested and snap frozen in LN2. Western blot is performed on tissues by running on SDS-PAGE gels using the Novex system (LifeTech Thermo, XP04200BOX, LC2675, LC3675, LC2676). Gels are transferred to low-fluorescence polyvinylidene fluoridev (PVDF) membrane (IPFL07810, LI-COR, Lincoln, NE, USA) and are stained with Revert 700 Total Protein Stain (TPS; 926-11010 LI-COR, Lincoln, NE, USA), followed by blocking with Odyssey blocking buffer (927-500000, LI-COR, Lincoln, NE, USA) in Tris buffer saline with 0.1% Tween 20 and staining with rabbit antibody against ASM (Origene custom service antibody production), or anti-GAPDH (ab9484, Abcam, Cambridge, MA, USA) and the appropriate secondary (926-32213 or 925-68070, LI-COR, Lincoln, NE, USA). Blots will be imaged with a LI-COR Odyssey CLx. Sphingomyelin lipid in tissues are also quantified using the Sphingomyelin Assay Kit (Abcam ab133118). We anticipate that 12847scfv:ASM and ASM:12847scfv will have increased delivery to target tissues compared to untargeted mROR-ASM. We anticipate that brain and spinal cord sphingomyelin lipid will be decreased in Smpd1^{-/-} mice treated with 12847scfv:ASM and ASM:12847scfv.

### Immunofluorescent Staining

[0774] Three-month old Smpd1^{-/-} mice are treated with 3 mg/kg LNP (g666/Cas9 mRNA) and 3e12 vg/kg of AAV8 delivering either mROR-ASM, 12847scfv:ASM, or ASM:12847scfv for insertion into the albumin locus. Four months post-injection, mice are euthanized, are perfused with saline via transcardial perfusion, and brain and spinal cord are fixed and sectioned. Brain and spinal cord are stained with GFAP astrocyte marker, Iba1 microglial marker, NeuN neuronal marker, and various Purkinje cell markers (including Calbindin 28k, Car8, and IP3R), and ASM. We anticipate that 12847scfv:ASM and ASM:12847scfv will be detectable in brain and spinal cord, but mROR-ASM will not. We anticipate that Purkinje cell survival will be improved in mice treated with 12847scfv:ASM and ASM:12847scfv, but not mROR-ASM or untreated animals. We anticipate that mice treated with 12847scfv:ASM and ASM:12847scfv will have less astrocyte and microglial activation/proliferation than untreated mice and mice treated with mROR-ASM.

### Behavioral and Survival Study

[0775] Two-month old Smpd1^{-/-} mice are treated with 3 mg/kg LNP (g666/Cas9 mRNA) and 3e12 vg/kg of AAV8 delivering either mROR-ASM, 12847scfv:ASM, or ASM:12847scfv for insertion into the albumin locus. Untreated Smpd1^{-/-} mice and Wt mice are controls. Over a 6-month period, mice are tested monthly for motor coordination on rotarod and balance beam tests. We anticipate that mice treated with 12847scfv:ASM, or ASM:12847scfv will perform better on rotarod and balance beam test compared to untreated Smpd1^{-/-} and mROR-ASM controls. We anticipate that mice treated with 12847scfv:ASM, or ASM:12847scfv will have better long-term survival than untreated Smpd1^{-/-} and mROR-ASM controls.

### Example 13. AAV8 Episomal Liver Depot Therapy in ASMD Mice

[0776] A study was designed to determine whether ASM:anti-TfR is delivered to target tissues and reduces sphingomyelin accumulation. Treatment started at four months old, at which point clear substrate and behavioral phenotypes were exhibited in the ASMD mice (Smpd1^{-/-}). Smpd1^{-/-};Tfrc^{hum/hum} mice have accumulation of sphingomyelin lipid in brain, liver, spleen, and heart as shown by plate-based sphingomyelin quantification assay. Smpd1^{-/-};Tfrc^{hum/hum} mice exhibit progressive motor dysfunction on rotarod and balance beam beginning at/before 2 months of age, and must be euthanized by 9 months of age due to severe hind limb paralysis and tremors. Immunofluorescence staining shows progressive loss of Purkinje neurons in the cerebellum in an anterior-posterior pattern, as well as astrogliosis throughout the brain.

[0777] Four-month old Smpd1^{-/-};Tfrc^{hum/hum} mice were injected via tail vein with 5e12 vg/kg rAAV8 expressing either untargeted ASM (mROR signal peptide) (SEQ ID NO: 856) or mROR:ASM:1xG4S:12847scFv (SEQ ID NO: 857) under the hAAT promoter. Controls were untreated Smpd^{-/-};Tfrc^{hum/hum} wild type and untreated Smpd1^{-/-};Tfrc^{hum/hum} mice. N=3-7 per group. Serum and tissues were collected five weeks post-injection. See FIG. 26.

[0778] Episomal ASM DNA in liver nucleotide preps was quantified by Tagman using standard protocols. See FIG. 27. Tissue lysates were prepared by lysis in RIPA buffer with protease inhibitors (1861282, Thermo Fisher, Waltham, MA, USA). Tissue lysates were homogenized with a bead homogenizer (FastPrep5, MP Biomedicals, Santa Ana, CA, USA). Tissue samples were reduced with Nu-PAGE sample reducing agent 10× (NP0004, ThermoFisher), while serum samples were non-reduced. Samples were run on SDS-PAGE gels using the Novex system (LifeTech Thermo, XPO4200BOX, LC2675, LC3675, LC2676). Gels were transferred to low-fluorescence polyvinylidene fluoridev (PVDF) membrane (IPFL07810, LI-COR, Lincoln, NE, USA) and stained with Revert 700 Total Protein Stain (TPS; 926-11010 LI-COR, Lincoln, NE, USA), followed by blocking with Odyssey blocking buffer (927-500000, LI-COR, Lincoln, NE, USA) in Tris buffer saline with 0.1% Tween 20 and staining with antibody against ASM (custom-made, Origene), and the appropriate secondary antibody (926-32213, LI-COR, Lincoln, NE, USA). We observed expression of both untargeted ASM and ASM:anti-TfR in livers and serum. See FIG. 27.

[0779] Sphingomyelin lipid in tissues was quantified using Abcam Sphingomyelin Assay Kit (AB287856). Tissues were homogenized with a bead homogenizer (FastPrep5, MP Biomedicals, Santa Ana, CA, USA) and centrifuged at 4° C. for 5 minutes @ 10,000 g. Sphingomyelin in sample supernatants was quantified using the kit according to manufacturer protocols. Both untargeted ASM and targeted ASM:anti-TfR decreased sphingomyelin accumulation in all tissues with episomal delivery. See FIG. 28A-28E.

### Example 14. Hydrodynamic Delivery of Redesigned TfR-Targeted ASM Plasmids in Tfrc^{hum} Mice

[0780] The original fusion formats resulted in lower levels of expression compared to untargeted ASM. To determine if expression in vivo could be improved over the original fusion formats (TfRscfv:1xG4S:ASM and ASM:1xG4S:TfRscfv, where the anti-TfR scfv is the 12847 clone in the Vk-Vh format, and “ASM” is the secreted form of human ASM), we undertook a re-design of the TfR-targeted ASM fusion protein formats to test whether we could improve protein expression. We tested N-terminal vs C-terminal fusion of the antibody to ASM, compared scFv- and Fab-ASM fusions (also switched the order of the light chains and heavy chains), and tested multiple protein linker sequences between the antibody fragment and ASM (2xG₄S, 3xG4S, 2xH4). Furthermore, we wanted to test these proteins in the format that would represent the protein produced from our platform insertion into intron 1 of the albumin locus, so we designed our fusion proteins with the hAlb signal peptide and included the first 8 amino acids of albumin exon 1 at the N-terminus. The experimental setup is shown in FIG. 29, and the constructs tested are shown in Table 48.

TABLE 48
Anti-TfR:ASM nucleic acid constructs.

| Category | Construct | SEQ ID NO |
|---|---|---|
| Targeted ASM (N-term) | hTfR-Fab-HeavyLight:sASM | 820 |
| | hTfR-Fab-LightHeavy:sASM | 821 |
| | hTfRscfv:2xG4S:sASM | 822 |
| | hTfRscfv:3xG4S:sASM | 824 |
| | hTfRscfv:2xH4:sASM | 823 |
| | hTfRscfv:VhVk:sASM | 831 |
| Targeted ASM (C-term) | sASM:hTfR-Fab-HeavyLight | 825 |
| | SASM:hTfR-Fab-LightHeavy | 826 |
| | SASM:2xG4S:hTfRscfv | 827 |
| | SASM:3xG4S:hTfRscfv | 830 |
| | SASM:2xH4:hTfRscfv | 829 |
| Untargeted ASM | mROR-sASM | 819 |
| | hAlb-sASM | 818 |
| Negative Control | hTfR:sASM-8D3 | 828 |

hTfR-Fab-HeavyLight = SEQ ID NO: 814 (encoding SEQ ID NO: 815)
SASM = SEQ ID NO: 732 (encoding SEQ ID NO: 733)
hTfR-Fab-LightHeavy = SEQ ID NO: 816 (encoding SEQ ID NO: 817)
hTfRscFv = SEQ ID NO: 532 (encoding SEQ ID NO: 508)
2xG4S = SEQ ID NO: 629 (encoding SEQ ID NO: 617)
3XG4S = SEQ ID NO: 620 (encoding SEQ ID NO: 616)
2XH4 = SEQ ID NO: 807 (encoding SEQ ID NO: 808)
hTfRscfv: VhVk = SEQ ID NO: 812 (encoding SEQ ID NO: 813)
hTfR:sASM-8D3 = SEQ ID NO: 810 (encoding SEQ ID NO: 811)

[0781] To test expression and stability of ASM fusion proteins in vivo, we treated adult Tfrc^{hum/hum} mice with 50 μg plasmid per mouse with the above fusion constructs. Negative controls were injected with saline vehicle or ASM fused with the anti-mouse 8D3 TfR scfv (will not bind human TfR in the Tfrc^{hum/hum} mice). Untargeted ASM controls were treated with hAlb-ASM and mROR-ASM. N=3-4 per treatment group. Expression was restricted to the liver by the mTTR promoter, so any anti-TfR:ASM protein observed in other tissues was taken up from the serum. Mice were euthanized with CO₂ 48 hours post-injection and perfused with saline via cardiac perfusion to remove blood from tissues. Collected tissues were flash-frozen in LN2.

[0782] Tissue lysates were prepared by lysis in RIPA buffer with protease inhibitors (1861282, Thermo Fisher, Waltham, MA, USA). Tissue lysates were homogenized with a bead homogenizer (FastPrep5, MP Biomedicals, Santa Ana, CA, USA). Tissue samples were reduced with Nu-PAGE sample reducing agent 10× (NP0004, ThermoFisher), while serum samples were non-reduced. Samples were run on SDS-PAGE gels using the Novex system (LifeTech Thermo, XP04200BOX, LC2675, LC3675, LC2676). Gels were transferred to low-fluorescence polyvinylidene fluoridev (PVDF) membrane (IPFL07810, LI-COR, Lincoln, NE, USA) and stained with Revert 700 Total Protein Stain (TPS; 926-11010 LI-COR, Lincoln, NE, USA), followed by blocking with Odyssey blocking buffer (927-500000, LI-COR, Lincoln, NE, USA) in Tris buffer saline with 0.1% Tween 20 and staining with antibody against ASM (custom-made, Origene), and the appropriate secondary antibody (926-32213, LI-COR, Lincoln, NE, USA).

[0783] Overall, fusions made with anti-hTfR antibody fragments on the N-terminus of ASM had higher expression from the liver and higher serum ASM than fusions with anti-hTfR antibody fragments on the C-terminus of ASM (data not shown). Several of the N-terminal anti-TfR:ASM fusion proteins expressed in the liver at similar levels to the untargeted hAlb-ASM, indicating that the antibody fusion did not affect protein stability. See FIG. 30. The hTfR1scfv-VhVk:2XG4S:ASM plasmid with the reversed Vh and Vk did not express as well as other formats in vivo (data not shown). While detection of delivered hASM in the brain was difficult because of the low sensitivity of the hASM antibody used, some hASM was detected in the cerebellum in mice treated with the N-terminal fusions, while no hASM was detected in brain from mice treated with untargeted ASM (data not shown).

[0784] The N-terminal fusions were then tested for ASM activity in the serum. ASM activity in serum was quantified using Acid Sphingomyelinase Activity Assay (ThermoFisher Amplex™ Red Sphingomyelinase Assay Kit, Cat #A12220) according to manufacturer's protocol for Acidic conditions. The anti-TfR:ASM proteins retained normal ASM activity, with hTfR-Fab-HL-sASM and hTfR-2xH-sASM showing highest activity (activity values were not normalized for protein expression). See FIG. 30.

[0785] The constructs were also tested in the Huh-7 cell line. Huh-7 human hepatocytes were transiently transfected with plasmids expressing the various TfR:ASM formats under the hAAT promoter using TransIT-LT1 transfection reagent (Mirus MIR 2304) according to manufacturer protocol. 48 hours post-transfection, cell media supernatants were collected and assayed for ASM protein by western blot and ASM activity.

[0786] Samples were reduced with Nu-PAGE sample reducing agent 10× (NP0004, ThermoFisher) and run on SDS-PAGE gels using the Novex system (LifeTech Thermo, XPO4200BOX, LC2675, LC3675, LC2676). Gels were transferred to low-fluorescence polyvinylidene fluoridev (PVDF) membrane (IPFL07810, LI-COR, Lincoln, NE, USA) and stained with Revert 700 Total Protein Stain (TPS; 926-11010 LI-COR, Lincoln, NE, USA), followed by blocking with Odyssey blocking buffer (927-500000, LI-COR, Lincoln, NE, USA) in Tris buffer saline with 0.1% Tween 20 and staining with antibody against ASM (custom-made, Origene), and the appropriate secondary antibody (926-32213, LI-COR, Lincoln, NE, USA). Expression is shown in FIG. 31.

[0787] ASM activity in Huh-7 cell media supernatants was quantified using Acid Sphingomyelinase Activity Assay (ThermoFisher Amplex™ Red Sphingomyelinase Assay Kit, Cat #A12220) according to manufacturer's protocol for Acidic conditions. As shown in FIG. 31, TfR:ASM fusions retain normal ASM activity, compared to untargeted “mROR-ASM” and “hAlb-ASM” controls with the mROR and human albumin signal peptides, respectively.

### Example 15. Albumin Insertion of Anti-TfR:ASM Templates in Tfrc^{hum/hum};Smpd1^{-/-} Mice

[0788] A study was designed to confirm anti-TfR:ASM expresses in the albumin insertion platform and to quantify sphingomyelin reduction in tissues. The anti-TfR antibody used was anti-human clone 12847. The experimental setup is shown in FIG. 32, and the constructs tested are shown in Table 49.

TABLE 49
Anti-TfR:ASM nucleic acid constructs.

| Category | Construct | SEQ ID NO | Encoded Protein SEQ ID NO |
|---|---|---|---|
| Targeted ASM | hTfR-Fab-HeavyLight:sASM | 832 | 833 |
| | hTfR-Fab-LightHeavy:sASM | 834 | 835 |
| | hTfR-2xG4S:sASM | 836 | 837 |
| | hTfR-3xG4S:sASM | 840 | 841 |
| | hTfR-2xH4:sASM | 838 | 839 |
| Untargeted ASM | hAlb-sASM | 732 | 733 |

hTfR-Fab-HeavyLight = SEQ ID NO: 814 (encoding SEQ ID NO: 815)
SASM = SEQ ID NO: 732 (encoding SEQ ID NO: 733)
hTfR-Fab-LightHeavy = SEQ ID NO: 816 (encoding SEQ ID NO: 817)
hTfR = hTfRscFv = SEQ ID NO: 532 (encoding SEQ ID NO: 508)
2xG4S = SEQ ID NO: 629 (encoding SEQ ID NO: 617)
3XG4S = SEQ ID NO: 620 (encoding SEQ ID NO: 616)
2XH4 = SEQ ID NO: 807 (encoding SEQ ID NO: 808)

[0789] One-month-old mice were used to prevent early sphingomyelin accumulation. Thirty-day old Smpd1^{-/-};Tfrc^{hum/hum} mice treated via retro-orbital injection with 3 mg/kg LNP (mouse surrogate guide g666 targeting mouse albumin intron 1) and 3e13 vg/kg AAV delivering various TfR:ASM templates. Controls were Smpd1−/−;Tfrc^{hum/hum} mice treated with untargeted ASM, and untreated Smpd1^{+/+};Tfrc^{hum/hum} wild type. Tissues and serum were harvested and flash-frozen in liquid nitrogen 6 weeks post-injection. See FIG. 32.

[0790] All anti-TfR:ASM formats had uniform transcript delivery and expression with albumin insertion in Tfrc^{hum/hum};Smpd1^{-/-} mice. No significant differences in DNA or RNA levels were observed. See FIG. 33. Insertion of anti-TfR:ASM exhibited variable protein expression and delivery in target tissues (data not shown). ASM expression was best for the Fab-HL, 2xG₄S, and 2xH4 constructs.

[0791] Sphingomyelin quantification was performed on flash-frozen tissues as described above. We demonstrated that anti-TfR:ASM insertion reduced sphingomyelin in cerebellum, lung, spleen, and heart in Smpd1^{-/-};Tfrc^{hum/hum} mice. See FIGS. 34A-34D. Several anti-TfR:ASM formats reduced sphingomyelin accumulation in the brain and visceral tissues at 6 weeks of treatment. Substrate reduction correlated with liver protein expression levels. Untargeted ASM rescued visceral sphingomyelin storage, but not brain storage.

[0792] Albumin insertion of anti-TfR:ASM did not induce splenomegaly in Tfrc^{hum/hum};Smpd1^{-/-} mice. Wet-weight of spleen did not statistically differ between treated, control, and non-treated mice. See FIG. 35.

### Example 16. Longitudinal Study of Insertion of Anti-TfR:ASM in Smpd1^{-/-};Tfrc^{hum} Mice

[0793] Thirty-day old Smpd1^{-/-}; Tfrc^{hum/hum} mice are treated via retro-orbital injection with 3 mg/kg LNP (mouse surrogate guide g666) and 3e13 vg/kg AAV delivering anti-TfR:ASM template. Controls are Smpd1^{-/-}; Tfrc^{hum/hum} mice treated with untargeted ASM, and untreated Smpd^{+/+}; Tfrc^{hum/hum} wild type.

[0794] Mice are tested at baseline and monthly post-injection. Mice are trained to perform the test for two consecutive days, then tested on the rotarod on the 3^{rd} day. The test parameters are: accelerating rotarod from 5-15 rpm, ramp speed of 60 seconds; total test is 180 seconds. On testing day, each mouse is tested 3 times and the median score is recorded.

[0795] Mice are tested at baseline and monthly post-injection on a standard balance beam apparatus, 100 cm long with enclosed end (Maze Engineers). On day 1, mice are trained on a 50 mm wide (easy) beam beginning at the halfway point, then traversing the full-length beam. On day 2, mice are trained on the 25 mm wide beam twice. On testing day (day 3), mice traverse the 25 mm wide beam 3 times, and the number of hind limb slips are recorded.

[0796] Sphingomyelin quantification is performed on flash-frozen tissues as described above.

[0797] Purkinje neuron quantification is performed as follows. Cerebellums from a subset of mice are perfused with saline and 4% paraformaldehyde and sectioned on vibratome in 35 m sagittal sections. Sections are mounted on slides and co-stained with IP3R1 and Car8 to detect Purkinje neurons. Slides are imaged at 4× or 20× on a Zeiss Axio Observer and images are manually analyzed to count the number of Purkinje neurons per cerebellar lobe.

[0798] We expect longitudinal expression of anti-TfR:ASM will outperform untargeted ASM in Smpd1^{-/-};Tfrc^{hum/hum} mice, normalize sphingomyelin in CNS and visceral tissues, improve performance in behavioral tests, rescue Purkinje cell survival in the cerebellum, and improve animal survival.

1. A multidomain therapeutic protein comprising a TfR-binding delivery domain fused to an acid sphingomyelinase polypeptide.

2.-21. (canceled)

22. A composition comprising a nucleic acid construct comprising a coding sequence for the multidomain therapeutic protein of claim 1.

23.-38. (canceled)

39. The composition of claim 22 in combination with a nuclease agent that targets a nuclease target site in a target genomic locus.

40.-66. (canceled)

67. A cell comprising the multidomain therapeutic protein of claim 1.

68.-70. (canceled)

71. A method comprising administering the multidomain therapeutic protein of claim 1 to a cell or a population of cells.

72. A method of inserting a nucleic acid encoding a multidomain therapeutic protein comprising a TfR-binding delivery domain fused to an acid sphingomyelinase polypeptide into a target genomic locus in a cell or a population of cells, comprising administering to the cell or the population of cells the composition of claim 39,
wherein the nuclease agent cleaves the nuclease target site in the target genomic locus, and the nucleic acid construct or the nucleic acid encoding the multidomain therapeutic protein is inserted into the target genomic locus.

73. A method of expressing a multidomain therapeutic protein comprising a TfR-binding delivery domain fused to an acid sphingomyelinase polypeptide in a cell or a population of cells, comprising administering to the cell or the population of cells the composition of claim 22,
wherein the coding sequence for the multidomain therapeutic protein is operably linked to a promoter in the nucleic acid construct and is expressed in the cell or population of cells.

74. A method of expressing a multidomain therapeutic protein comprising a TfR-binding delivery domain fused to an acid sphingomyelinase polypeptide from a target genomic locus in a cell or a population of cells, comprising administering to the cell or the population of cells the composition of claim 39, optionally wherein the nucleic acid construct is administered simultaneously with, prior to, or after the nuclease agent or the one or more nucleic acids encoding the nuclease agent,
wherein the nuclease agent cleaves the nuclease target site in the target genomic locus, the nucleic acid construct or the coding sequence for the multidomain therapeutic protein is inserted into the target genomic locus to create a modified target genomic locus, and the multidomain therapeutic protein comprising the TfR-binding delivery domain fused to an acid sphingomyelinase polypeptide is expressed from the modified target genomic locus.

75.-79. (canceled)

80. A method comprising administering the multidomain therapeutic protein of claim 1 to a subject.

81. A method of inserting a nucleic acid encoding a multidomain therapeutic protein comprising TfR-binding delivery domain fused to an acid sphingomyelinase polypeptide into a target genomic locus in a cell in a subject, comprising administering to the subject the composition of claim 39,
wherein the nuclease agent cleaves the nuclease target site in the target genomic locus, and the nucleic acid construct or the coding sequence for the multidomain therapeutic protein is inserted into the target genomic locus.

82. A method of expressing a multidomain therapeutic protein comprising a TfR-binding delivery domain fused to an acid sphingomyelinase polypeptide protein in a cell in a subject, comprising administering to the subject the composition of claim 22,
wherein the coding sequence for the multidomain therapeutic protein is operably linked to a promoter in the nucleic acid construct and is expressed in the cell.

83. A method of expressing a multidomain therapeutic protein comprising a TfR-binding delivery domain fused to an acid sphingomyelinase polypeptide protein from a target genomic locus in a cell in a subject, comprising administering to the subject the composition of claim 39, optionally wherein the nucleic acid construct is administered simultaneously with, prior to, or after the nuclease agent or the one or more nucleic acids encoding the nuclease agent,
wherein the nuclease agent cleaves the nuclease target site in the target genomic locus, the nucleic acid construct or the coding sequence for the multidomain therapeutic protein is inserted into the target genomic locus to create a modified target genomic locus, and the multidomain therapeutic protein comprising the TfR-binding delivery domain fused to an acid sphingomyelinase polypeptide is expressed from the modified target genomic locus.

84.-87. (canceled)

88. A method of treating an acid sphingomyelinase deficiency in a subject in need thereof, comprising administering to the subject the multidomain therapeutic protein of claim 1.

89. A method of treating an acid sphingomyelinase deficiency in a subject in need thereof, comprising administering to the subject the composition of claim 22,
wherein the coding sequence for the multidomain therapeutic protein is operably linked to a promoter in the nucleic acid construct and is expressed in the subject.

90. A method of treating an acid sphingomyelinase deficiency in a subject in need thereof, comprising administering to the subject the composition of claim 39, optionally wherein the nucleic acid construct is administered simultaneously with, prior to, or after the nuclease agent or the one or more nucleic acids encoding the nuclease agent,
wherein the nuclease agent cleaves the nuclease target site in the target genomic locus, the nucleic acid construct or the coding sequence for the multidomain therapeutic protein is inserted into the target genomic locus to create a modified target genomic locus, and the multidomain therapeutic protein comprising the TfR-binding delivery domain fused to an acid sphingomyelinase polypeptide is expressed from the modified target genomic locus.

91. A method of preventing or reducing the onset of a sign or symptom of acid sphingomyelinase deficiency in a subject in need thereof, comprising administering to the subject the multidomain therapeutic protein of claim 1, thereby preventing or reducing the onset of a sign or symptom of the acid sphingomyelinase deficiency in the subject.

92. A method of preventing or reducing the onset of a sign or symptom of acid sphingomyelinase deficiency in a subject in need thereof, comprising administering to the subject the composition of claim 22,
wherein the coding sequence for the multidomain therapeutic protein is operably linked to a promoter in the nucleic acid construct and is expressed in the subject, thereby preventing or reducing the onset of a sign or symptom of the acid sphingomyelinase deficiency in the subject.

93. A method of preventing or reducing the onset of a sign or symptom of acid sphingomyelinase deficiency in a subject in need thereof, comprising administering to the subject the composition of claim 39, optionally wherein the nucleic acid construct is administered simultaneously with, prior to, or after the nuclease agent or the one or more nucleic acids encoding the nuclease agent,
wherein the nuclease agent cleaves the nuclease target site, the nucleic acid construct or the coding sequence for the multidomain therapeutic protein is inserted into the target genomic locus to create a modified target genomic locus, and the multidomain therapeutic protein comprising the TfR-binding delivery domain fused to an acid sphingomyelinase polypeptide is expressed from the modified target genomic locus, thereby preventing or reducing the onset of a sign or symptom of the acid sphingomyelinase deficiency in the subject.

94.-104. (canceled)

105. A cell comprising the composition of claim 22.

The application's sequence listing, which the Patent Office published only in electronic form, follows.

SEQUENCE LISTING (857 sequences)

SEQ ID NO: 1 - RNA, 4423 nt, synthetic construct
  source 1..4423: mol_type = other RNA
gggaagctcagaataaacgctcaactttggccggatctgccaccatggacaagaagtactccatcggcctggacatcggcaccaactccgtgggctgggccgtgatcaccgacgagtacaaggtgccctccaagaagttcaaggtgctgggcaacaccgaccggcactccatcaagaagaacctgatcggcgccctgctgttcgactccggcgagaccgccgaggccacccggctgaagcggaccgcccggcggcggtacacccggcggaagaaccggatctgctacctgcaggagatcttctccaacgagatggccaaggtggacgactccttcttccaccggctggaggagtccttcctggtggaggaggacaagaagcacgagcggcaccccatcttcggcaacatcgtggacgaggtggcctaccacgagaagtaccccaccatctaccacctgcggaagaagctggtggactccaccgacaaggccgacctgcggctgatctacctggccctggcccacatgatcaagttccggggccacttcctgatcgagggcgacctgaaccccgacaactccgacgtggacaagctgttcatccagctggtgcagacctacaaccagctgttcgaggagaaccccatcaacgcctccggcgtggacgccaaggccatcctgtccgcccggctgtccaagtcccggcggctggagaacctgatcgcccagctgcccggcgagaagaagaacggcctgttcggcaacctgatcgccctgtccctgggcctgacccccaacttcaagtccaacttcgacctggccgaggacgccaagctgcagctgtccaaggacacctacgacgacgacctggacaacctgctggcccagatcggcgaccagtacgccgacctgttcctggccgccaagaacctgtccgacgccatcctgctgtccgacatcctgcgggtgaacaccgagatcaccaaggcccccctgtccgcctccatgatcaagcggtacgacgagcaccaccaggacctgaccctgctgaaggccctggtgcggcagcagctgcccgagaagtacaaggagatcttcttcgaccagtccaagaacggctacgccggctacatcgacggcggcgcctcccaggaggagttctacaagttcatcaagcccatcctggagaagatggacggcaccgaggagctgctggtgaagctgaaccgggaggacctgctgcggaagcagcggaccttcgacaacggctccatcccccaccagatccacctgggcgagctgcacgccatcctgcggcggcaggaggacttctaccccttcctgaaggacaaccgggagaagatcgagaagatcctgaccttccggatcccctactacgtgggccccctggcccggggcaactcccggttcgcctggatgacccggaagtccgaggagaccatcaccccctggaacttcgaggaggtggtggacaagggcgcctccgcccagtccttcatcgagcggatgaccaacttcgacaagaacctgcccaacgagaaggtgctgcccaagcactccctgctgtacgagtacttcaccgtgtacaacgagctgaccaaggtgaagtacgtgaccgagggcatgcggaagcccgccttcctgtccggcgagcagaagaaggccatcgtggacctgctgttcaagaccaaccggaaggtgaccgtgaagcagctgaaggaggactacttcaagaagatcgagtgcttcgactccgtggagatctccggcgtggaggaccggttcaacgcctccctgggcacctaccacgacctgctgaagatcatcaaggacaaggacttcctggacaacgaggagaacgaggacatcctggaggacatcgtgctgaccctgaccctgttcgaggaccgggagatgatcgaggagcggctgaagacctacgcccacctgttcgacgacaaggtgatgaagcagctgaagcggcggcggtacaccggctggggccggctgtcccggaagctgatcaacggcatccgggacaagcagtccggcaagaccatcctggacttcctgaagtccgacggcttcgccaaccggaacttcatgcagctgatccacgacgactccctgaccttcaaggaggacatccagaaggcccaggtgtccggccagggcgactccctgcacgagcacatcgccaacctggccggctcccccgccatcaagaagggcatcctgcagaccgtgaaggtggtggacgagctggtgaaggtgatgggccggcacaagcccgagaacatcgtgatcgagatggcccgggagaaccagaccacccagaagggccagaagaactcccgggagcggatgaagcggatcgaggagggcatcaaggagctgggctcccagatcctgaaggagcaccccgtggagaacacccagctgcagaacgagaagctgtacctgtactacctgcagaacggccgggacatgtacgtggaccaggagctggacatcaaccggctgtccgactacgacgtggaccacatcgtgccccagtccttcctgaaggacgactccatcgacaacaaggtgctgacccggtccgacaagaaccggggcaagtccgacaacgtgccctccgaggaggtggtgaagaagatgaagaactactggcggcagctgctgaacgccaagctgatcacccagcggaagttcgacaacctgaccaaggccgagcggggcggcctgtccgagctggacaaggccggcttcatcaagcggcagctggtggagacccggcagatcaccaagcacgtggcccagatcctggactcccggatgaacaccaagtacgacgagaacgacaagctgatccgggaggtgaaggtgatcaccctgaagtccaagctggtgtccgacttccggaaggacttccagttctacaaggtgcgggagatcaacaactaccaccacgcccacgacgcctacctgaacgccgtggtgggcaccgccctgatcaagaagtaccccaagctggagtccgagttcgtgtacggcgactacaaggtgtacgacgtgcggaagatgatcgccaagtccgagcaggagatcggcaaggccaccgccaagtacttcttctactccaacatcatgaacttcttcaagaccgagatcaccctggccaacggcgagatccggaagcggcccctgatcgagaccaacggcgagaccggcgagatcgtgtgggacaagggccgggacttcgccaccgtgcggaaggtgctgtccatgccccaggtgaacatcgtgaagaagaccgaggtgcagaccggcggcttctccaaggagtccatcctgcccaagcggaactccgacaagctgatcgcccggaagaaggactgggaccccaagaagtacggcggcttcgactcccccaccgtggcctactccgtgctggtggtggccaaggtggagaagggcaagtccaagaagctgaagtccgtgaaggagctgctgggcatcaccatcatggagcggtcctccttcgagaagaaccccatcgacttcctggaggccaagggctacaaggaggtgaagaaggacctgatcatcaagctgcccaagtactccctgttcgagctggagaacggccggaagcggatgctggcctccgccggcgagctgcagaagggcaacgagctggccctgccctccaagtacgtgaacttcctgtacctggcctcccactacgagaagctgaagggctcccccgaggacaacgagcagaagcagctgttcgtggagcagcacaagcactacctggacgagatcatcgagcagatctccgagttctccaagcgggtgatcctggccgacgccaacctggacaaggtgctgtccgcctacaacaagcaccgggacaagcccatccgggagcaggccgagaacatcatccacctgttcaccctgaccaacctgggcgcccccgccgccttcaagtacttcgacaccaccatcgaccggaagcggtacacctccaccaaggaggtgctggacgccaccctgatccaccagtccatcaccggcctgtacgagacccggatcgacctgtcccagctgggcggcgacggcggcggctcccccaagaagaagcggaaggtgtgactagcaccagcctcaagaacacccgaatggagtctctaagctacataataccaacttacactttacaaaatgttgtcccccaaaatgtagccattcgtatctgctcctaataaaaagaaagtttcttcacattctctcgagaaaaaaaaaaaaaaaaaaaaaaaaaaaaaaaaaaaaaaaaaaaaaaaaaaaaaaaaaaaaaaaaaaaaaaaaaaaaaaaaaaaaaaaaaaaaatctag

SEQ ID NO: 2 - RNA, 4140 nt, synthetic construct
  source 1..4140: mol_type = other RNA
atggacaagaagtactccatcggcctggacatcggcaccaactccgtgggctgggccgtgatcaccgacgagtacaaggtgccctccaagaagttcaaggtgctgggcaacaccgaccggcactccatcaagaagaacctgatcggcgccctgctgttcgactccggcgagaccgccgaggccacccggctgaagcggaccgcccggcggcggtacacccggcggaagaaccggatctgctacctgcaggagatcttctccaacgagatggccaaggtggacgactccttcttccaccggctggaggagtccttcctggtggaggaggacaagaagcacgagcggcaccccatcttcggcaacatcgtggacgaggtggcctaccacgagaagtaccccaccatctaccacctgcggaagaagctggtggactccaccgacaaggccgacctgcggctgatctacctggccctggcccacatgatcaagttccggggccacttcctgatcgagggcgacctgaaccccgacaactccgacgtggacaagctgttcatccagctggtgcagacctacaaccagctgttcgaggagaaccccatcaacgcctccggcgtggacgccaaggccatcctgtccgcccggctgtccaagtcccggcggctggagaacctgatcgcccagctgcccggcgagaagaagaacggcctgttcggcaacctgatcgccctgtccctgggcctgacccccaacttcaagtccaacttcgacctggccgaggacgccaagctgcagctgtccaaggacacctacgacgacgacctggacaacctgctggcccagatcggcgaccagtacgccgacctgttcctggccgccaagaacctgtccgacgccatcctgctgtccgacatcctgcgggtgaacaccgagatcaccaaggcccccctgtccgcctccatgatcaagcggtacgacgagcaccaccaggacctgaccctgctgaaggccctggtgcggcagcagctgcccgagaagtacaaggagatcttcttcgaccagtccaagaacggctacgccggctacatcgacggcggcgcctcccaggaggagttctacaagttcatcaagcccatcctggagaagatggacggcaccgaggagctgctggtgaagctgaaccgggaggacctgctgcggaagcagcggaccttcgacaacggctccatcccccaccagatccacctgggcgagctgcacgccatcctgcggcggcaggaggacttctaccccttcctgaaggacaaccgggagaagatcgagaagatcctgaccttccggatcccctactacgtgggccccctggcccggggcaactcccggttcgcctggatgacccggaagtccgaggagaccatcaccccctggaacttcgaggaggtggtggacaagggcgcctccgcccagtccttcatcgagcggatgaccaacttcgacaagaacctgcccaacgagaaggtgctgcccaagcactccctgctgtacgagtacttcaccgtgtacaacgagctgaccaaggtgaagtacgtgaccgagggcatgcggaagcccgccttcctgtccggcgagcagaagaaggccatcgtggacctgctgttcaagaccaaccggaaggtgaccgtgaagcagctgaaggaggactacttcaagaagatcgagtgcttcgactccgtggagatctccggcgtggaggaccggttcaacgcctccctgggcacctaccacgacctgctgaagatcatcaaggacaaggacttcctggacaacgaggagaacgaggacatcctggaggacatcgtgctgaccctgaccctgttcgaggaccgggagatgatcgaggagcggctgaagacctacgcccacctgttcgacgacaaggtgatgaagcagctgaagcggcggcggtacaccggctggggccggctgtcccggaagctgatcaacggcatccgggacaagcagtccggcaagaccatcctggacttcctgaagtccgacggcttcgccaaccggaacttcatgcagctgatccacgacgactccctgaccttcaaggaggacatccagaaggcccaggtgtccggccagggcgactccctgcacgagcacatcgccaacctggccggctcccccgccatcaagaagggcatcctgcagaccgtgaaggtggtggacgagctggtgaaggtgatgggccggcacaagcccgagaacatcgtgatcgagatggcccgggagaaccagaccacccagaagggccagaagaactcccgggagcggatgaagcggatcgaggagggcatcaaggagctgggctcccagatcctgaaggagcaccccgtggagaacacccagctgcagaacgagaagctgtacctgtactacctgcagaacggccgggacatgtacgtggaccaggagctggacatcaaccggctgtccgactacgacgtggaccacatcgtgccccagtccttcctgaaggacgactccatcgacaacaaggtgctgacccggtccgacaagaaccggggcaagtccgacaacgtgccctccgaggaggtggtgaagaagatgaagaactactggcggcagctgctgaacgccaagctgatcacccagcggaagttcgacaacctgaccaaggccgagcggggcggcctgtccgagctggacaaggccggcttcatcaagcggcagctggtggagacccggcagatcaccaagcacgtggcccagatcctggactcccggatgaacaccaagtacgacgagaacgacaagctgatccgggaggtgaaggtgatcaccctgaagtccaagctggtgtccgacttccggaaggacttccagttctacaaggtgcgggagatcaacaactaccaccacgcccacgacgcctacctgaacgccgtggtgggcaccgccctgatcaagaagtaccccaagctggagtccgagttcgtgtacggcgactacaaggtgtacgacgtgcggaagatgatcgccaagtccgagcaggagatcggcaaggccaccgccaagtacttcttctactccaacatcatgaacttcttcaagaccgagatcaccctggccaacggcgagatccggaagcggcccctgatcgagaccaacggcgagaccggcgagatcgtgtgggacaagggccgggacttcgccaccgtgcggaaggtgctgtccatgccccaggtgaacatcgtgaagaagaccgaggtgcagaccggcggcttctccaaggagtccatcctgcccaagcggaactccgacaagctgatcgcccggaagaaggactgggaccccaagaagtacggcggcttcgactcccccaccgtggcctactccgtgctggtggtggccaaggtggagaagggcaagtccaagaagctgaagtccgtgaaggagctgctgggcatcaccatcatggagcggtcctccttcgagaagaaccccatcgacttcctggaggccaagggctacaaggaggtgaagaaggacctgatcatcaagctgcccaagtactccctgttcgagctggagaacggccggaagcggatgctggcctccgccggcgagctgcagaagggcaacgagctggccctgccctccaagtacgtgaacttcctgtacctggcctcccactacgagaagctgaagggctcccccgaggacaacgagcagaagcagctgttcgtggagcagcacaagcactacctggacgagatcatcgagcagatctccgagttctccaagcgggtgatcctggccgacgccaacctggacaaggtgctgtccgcctacaacaagcaccgggacaagcccatccgggagcaggccgagaacatcatccacctgttcaccctgaccaacctgggcgcccccgccgccttcaagtacttcgacaccaccatcgaccggaagcggtacacctccaccaaggaggtgctggacgccaccctgatccaccagtccatcaccggcctgtacgagacccggatcgacctgtcccagctgggcggcgacggcggcggctcccccaagaagaagcggaaggtgtga

SEQ ID NO: 3 - DNA, 4140 bp, synthetic construct
  source 1..4140: mol_type = other DNA
atggacaagaagtactccatcggcctggacatcggcaccaactccgtgggctgggccgtgatcaccgacgagtacaaggtgccctccaagaagttcaaggtgctgggcaacaccgaccggcactccatcaagaagaacctgatcggcgccctgctgttcgactccggcgagaccgccgaggccacccggctgaagcggaccgcccggcggcggtacacccggcggaagaaccggatctgctacctgcaggagatcttctccaacgagatggccaaggtggacgactccttcttccaccggctggaggagtccttcctggtggaggaggacaagaagcacgagcggcaccccatcttcggcaacatcgtggacgaggtggcctaccacgagaagtaccccaccatctaccacctgcggaagaagctggtggactccaccgacaaggccgacctgcggctgatctacctggccctggcccacatgatcaagttccggggccacttcctgatcgagggcgacctgaaccccgacaactccgacgtggacaagctgttcatccagctggtgcagacctacaaccagctgttcgaggagaaccccatcaacgcctccggcgtggacgccaaggccatcctgtccgcccggctgtccaagtcccggcggctggagaacctgatcgcccagctgcccggcgagaagaagaacggcctgttcggcaacctgatcgccctgtccctgggcctgacccccaacttcaagtccaacttcgacctggccgaggacgccaagctgcagctgtccaaggacacctacgacgacgacctggacaacctgctggcccagatcggcgaccagtacgccgacctgttcctggccgccaagaacctgtccgacgccatcctgctgtccgacatcctgcgggtgaacaccgagatcaccaaggcccccctgtccgcctccatgatcaagcggtacgacgagcaccaccaggacctgaccctgctgaaggccctggtgcggcagcagctgcccgagaagtacaaggagatcttcttcgaccagtccaagaacggctacgccggctacatcgacggcggcgcctcccaggaggagttctacaagttcatcaagcccatcctggagaagatggacggcaccgaggagctgctggtgaagctgaaccgggaggacctgctgcggaagcagcggaccttcgacaacggctccatcccccaccagatccacctgggcgagctgcacgccatcctgcggcggcaggaggacttctaccccttcctgaaggacaaccgggagaagatcgagaagatcctgaccttccggatcccctactacgtgggccccctggcccggggcaactcccggttcgcctggatgacccggaagtccgaggagaccatcaccccctggaacttcgaggaggtggtggacaagggcgcctccgcccagtccttcatcgagcggatgaccaacttcgacaagaacctgcccaacgagaaggtgctgcccaagcactccctgctgtacgagtacttcaccgtgtacaacgagctgaccaaggtgaagtacgtgaccgagggcatgcggaagcccgccttcctgtccggcgagcagaagaaggccatcgtggacctgctgttcaagaccaaccggaaggtgaccgtgaagcagctgaaggaggactacttcaagaagatcgagtgcttcgactccgtggagatctccggcgtggaggaccggttcaacgcctccctgggcacctaccacgacctgctgaagatcatcaaggacaaggacttcctggacaacgaggagaacgaggacatcctggaggacatcgtgctgaccctgaccctgttcgaggaccgggagatgatcgaggagcggctgaagacctacgcccacctgttcgacgacaaggtgatgaagcagctgaagcggcggcggtacaccggctggggccggctgtcccggaagctgatcaacggcatccgggacaagcagtccggcaagaccatcctggacttcctgaagtccgacggcttcgccaaccggaacttcatgcagctgatccacgacgactccctgaccttcaaggaggacatccagaaggcccaggtgtccggccagggcgactccctgcacgagcacatcgccaacctggccggctcccccgccatcaagaagggcatcctgcagaccgtgaaggtggtggacgagctggtgaaggtgatgggccggcacaagcccgagaacatcgtgatcgagatggcccgggagaaccagaccacccagaagggccagaagaactcccgggagcggatgaagcggatcgaggagggcatcaaggagctgggctcccagatcctgaaggagcaccccgtggagaacacccagctgcagaacgagaagctgtacctgtactacctgcagaacggccgggacatgtacgtggaccaggagctggacatcaaccggctgtccgactacgacgtggaccacatcgtgccccagtccttcctgaaggacgactccatcgacaacaaggtgctgacccggtccgacaagaaccggggcaagtccgacaacgtgccctccgaggaggtggtgaagaagatgaagaactactggcggcagctgctgaacgccaagctgatcacccagcggaagttcgacaacctgaccaaggccgagcggggcggcctgtccgagctggacaaggccggcttcatcaagcggcagctggtggagacccggcagatcaccaagcacgtggcccagatcctggactcccggatgaacaccaagtacgacgagaacgacaagctgatccgggaggtgaaggtgatcaccctgaagtccaagctggtgtccgacttccggaaggacttccagttctacaaggtgcgggagatcaacaactaccaccacgcccacgacgcctacctgaacgccgtggtgggcaccgccctgatcaagaagtaccccaagctggagtccgagttcgtgtacggcgactacaaggtgtacgacgtgcggaagatgatcgccaagtccgagcaggagatcggcaaggccaccgccaagtacttcttctactccaacatcatgaacttcttcaagaccgagatcaccctggccaacggcgagatccggaagcggcccctgatcgagaccaacggcgagaccggcgagatcgtgtgggacaagggccgggacttcgccaccgtgcggaaggtgctgtccatgccccaggtgaacatcgtgaagaagaccgaggtgcagaccggcggcttctccaaggagtccatcctgcccaagcggaactccgacaagctgatcgcccggaagaaggactgggaccccaagaagtacggcggcttcgactcccccaccgtggcctactccgtgctggtggtggccaaggtggagaagggcaagtccaagaagctgaagtccgtgaaggagctgctgggcatcaccatcatggagcggtcctccttcgagaagaaccccatcgacttcctggaggccaagggctacaaggaggtgaagaaggacctgatcatcaagctgcccaagtactccctgttcgagctggagaacggccggaagcggatgctggcctccgccggcgagctgcagaagggcaacgagctggccctgccctccaagtacgtgaacttcctgtacctggcctcccactacgagaagctgaagggctcccccgaggacaacgagcagaagcagctgttcgtggagcagcacaagcactacctggacgagatcatcgagcagatctccgagttctccaagcgggtgatcctggccgacgccaacctggacaaggtgctgtccgcctacaacaagcaccgggacaagcccatccgggagcaggccgagaacatcatccacctgttcaccctgaccaacctgggcgcccccgccgccttcaagtacttcgacaccaccatcgaccggaagcggtacacctccaccaaggaggtgctggacgccaccctgatccaccagtccatcaccggcctgtacgagacccggatcgacctgtcccagctgggcggcgacggcggcggctcccccaagaagaagcggaaggtgtga

SEQ ID NO: 4 - DNA, 709 bp, Homo sapiens
  source 1..709: mol_type = other DNA
gtaagaaatccatttttctattgttcaacttttattctattttcccagtaaaataaagttttagtaaactctgcatctttaaagaattattttggcatttatttctaaaatggcatagtattttgtatttgtgaagtcttacaaggttatcttattaataaaattcaaacatcctaggtaaaaaaaaaaaaaggtcagaattgtttagtgactgtaattttcttttgcgcactaaggaaagtgcaaagtaacttagagtgactgaaacttcacagaatagggttgaagattgaattcataactatcccaaagacctatccattgcactatgctttatttaaaaaccacaaaacctgtgctgttgatctcataaatagaacttgtatttatatttattttcattttagtctgtcttcttggttgctgttgatagacactaaaagagtattagatattatctaagtttgaatataaggctataaatatttaataatttttaaaatagtattcttggtaattgaattattcttctgtttaaaggcagaagaaataattgaacatcatcctgagtttttctgtaggaatcagagcccaatattttgaaacaaatgcataatctaagtcaaatggaaagaaatataaaaagtaacattattacttcttgttttcttcagtatttaacaatccttttttttcttcccttgcccag

SEQ ID NO: 5-7 - skipped (3 entries)

SEQ ID NO: 8 - protein, 1391 aa, synthetic construct
MDKPKKKRKVKYSIGLDIGTNSVGWAVITDEYKVPSKKFKVLGNTDRHSIKKNLIGALLFDSGETAEATRLKRTARRRYTRRKNRICYLQEIFSNEMAKVDDSFFHRLEESFLVEEDKKHERHPIFGNIVDEVAYHEKYPTIYHLRKKLVDSTDKADLRLIYLALAHMIKFRGHFLIEGDLNPDNSDVDKLFIQLVQTYNQLFEENPINASGVDAKAILSARLSKSRRLENLIAQLPGEKKNGLFGNLIALSLGLTPNFKSNFDLAEDAKLQLSKDTYDDDLDNLLAQIGDQYADLFLAAKNLSDAILLSDILRVNTEITKAPLSASMIKRYDEHHQDLTLLKALVRQQLPEKYKEIFFDQSKNGYAGYIDGGASQEEFYKFIKPILEKMDGTEELLVKLNREDLLRKQRTFDNGSIPHQIHLGELHAILRRQEDFYPFLKDNREKIEKILTFRIPYYVGPLARGNSRFAWMTRKSEETITPWNFEEVVDKGASAQSFIERMTNFDKNLPNEKVLPKHSLLYEYFTVYNELTKVKYVTEGMRKPAFLSGEQKKAIVDLLFKTNRKVTVKQLKEDYFKKIECFDSVEISGVEDRFNASLGTYHDLLKIIKDKDFLDNEENEDILEDIVLTLTLFEDREMIEERLKTYAHLFDDKVMKQLKRRRYTGWGRLSRKLINGIRDKQSGKTILDFLKSDGFANRNFMQLIHDDSLTFKEDIQKAQVSGQGDSLHEHIANLAGSPAIKKGILQTVKVVDELVKVMGRHKPENIVIEMARENQTTQKGQKNSRERMKRIEEGIKELGSQILKEHPVENTQLQNEKLYLYYLQNGRDMYVDQELDINRLSDYDVDHIVPQSFLKDDSIDNKVLTRSDKNRGKSDNVPSEEVVKKMKNYWRQLLNAKLITQRKFDNLTKAERGGLSELDKAGFIKRQLVETRQITKHVAQILDSRMNTKYDENDKLIREVKVITLKSKLVSDFRKDFQFYKVREINNYHHAHDAYLNAVVGTALIKKYPKLESEFVYGDYKVYDVRKMIAKSEQEIGKATAKYFFYSNIMNFFKTEITLANGEIRKRPLIETNGETGEIVWDKGRDFATVRKVLSMPQVNIVKKTEVQTGGFSKESILPKRNSDKLIARKKDWDPKKYGGFDSPTVAYSVLVVAKVEKGKSKKLKSVKELLGITIMERSSFEKNPIDFLEAKGYKEVKKDLIIKLPKYSLFELENGRKRMLASAGELQKGNELALPSKYVNFLYLASHYEKLKGSPEDNEQKQLFVEQHKHYLDEIIEQISEFSKRVILADANLDKVLSAYNKHRDKPIREQAENIIHLFTLTNLGAPAAFKYFDTTIDRKRYTSTKEVLDATLIHQSITGLYETRIDLSQLGGDKRPAATKKAGQAKKKK

SEQ ID NO: 9 - DNA, 4176 bp, synthetic construct
  source 1..4176: mol_type = other DNA
atggacaagcccaagaaaaagcggaaagtgaagtacagcatcggcctggacatcggcaccaactctgtgggctgggccgtgatcaccgacgagtacaaggtgcccagcaagaaattcaaggtgctgggcaacaccgacaggcacagcatcaagaagaacctgatcggcgccctgctgttcgacagcggcgaaacagccgaggccaccagactgaagagaaccgccagaagaagatacaccaggcggaagaacaggatctgctatctgcaagagatcttcagcaacgagatggccaaggtggacgacagcttcttccacagactggaagagtccttcctggtggaagaggacaagaagcacgagagacaccccatcttcggcaacatcgtggacgaggtggcctaccacgagaagtaccccaccatctaccacctgagaaagaaactggtggacagcaccgacaaggccgacctgagactgatctacctggccctggcccacatgatcaagttcagaggccacttcctgatcgagggcgacctgaaccccgacaacagcgacgtggacaagctgttcatccagctggtgcagacctacaaccagctgttcgaggaaaaccccatcaacgccagcggcgtggacgccaaggctatcctgtctgccagactgagcaagagcagaaggctggaaaatctgatcgcccagctgcccggcgagaagaagaacggcctgttcggcaacctgattgccctgagcctgggcctgacccccaacttcaagagcaacttcgacctggccgaggatgccaaactgcagctgagcaaggacacctacgacgacgacctggacaacctgctggcccagatcggcgaccagtacgccgacctgttcctggccgccaagaacctgtctgacgccatcctgctgagcgacatcctgagagtgaacaccgagatcaccaaggcccccctgagcgcctctatgatcaagagatacgacgagcaccaccaggacctgaccctgctgaaagctctcgtgcggcagcagctgcctgagaagtacaaagaaatcttcttcgaccagagcaagaacggctacgccggctacatcgatggcggcgctagccaggaagagttctacaagttcatcaagcccatcctggaaaagatggacggcaccgaggaactgctcgtgaagctgaacagagaggacctgctgagaaagcagagaaccttcgacaacggcagcatcccccaccagatccacctgggagagctgcacgctatcctgagaaggcaggaagatttttacccattcctgaaggacaaccgggaaaagatcgagaagatcctgaccttcaggatcccctactacgtgggccccctggccagaggcaacagcagattcgcctggatgaccagaaagagcgaggaaaccatcaccccctggaacttcgaggaagtggtggacaagggcgccagcgcccagagcttcatcgagagaatgacaaacttcgataagaacctgcccaacgagaaggtgctgcccaagcacagcctgctgtacgagtacttcaccgtgtacaacgagctgaccaaagtgaaatacgtgaccgagggaatgagaaagcccgccttcctgagcggcgagcagaaaaaggccatcgtggacctgctgttcaagaccaacagaaaagtgaccgtgaagcagctgaaagaggactacttcaagaaaatcgagtgcttcgactccgtggaaatctccggcgtggaagatagattcaacgcctccctgggcacataccacgatctgctgaaaattatcaaggacaaggacttcctggataacgaagagaacgaggacattctggaagatatcgtgctgaccctgacactgtttgaggaccgcgagatgatcgaggaaaggctgaaaacctacgctcacctgttcgacgacaaagtgatgaagcagctgaagagaaggcggtacaccggctggggcaggctgagcagaaagctgatcaacggcatcagagacaagcagagcggcaagacaatcctggatttcctgaagtccgacggcttcgccaaccggaacttcatgcagctgatccacgacgacagcctgacattcaaagaggacatccagaaagcccaggtgtccggccagggcgactctctgcacgagcatatcgctaacctggccggcagccccgctatcaagaagggcatcctgcagacagtgaaggtggtggacgagctcgtgaaagtgatgggcagacacaagcccgagaacatcgtgatcgagatggctagagagaaccagaccacccagaagggacagaagaactcccgcgagaggatgaagagaatcgaagagggcatcaaagagctgggcagccagatcctgaaagaacaccccgtggaaaacacccagctgcagaacgagaagctgtacctgtactacctgcagaatggccgggatatgtacgtggaccaggaactggacatcaacagactgtccgactacgatgtggaccatatcgtgcctcagagctttctgaaggacgactccatcgataacaaagtgctgactcggagcgacaagaacagaggcaagagcgacaacgtgccctccgaagaggtcgtgaagaagatgaagaactactggcgacagctgctgaacgccaagctgattacccagaggaagttcgataacctgaccaaggccgagagaggcggcctgagcgagctggataaggccggcttcatcaagaggcagctggtggaaaccagacagatcacaaagcacgtggcacagatcctggactcccggatgaacactaagtacgacgaaaacgataagctgatccgggaagtgaaagtgatcaccctgaagtccaagctggtgtccgatttccggaaggatttccagttttacaaagtgcgcgagatcaacaactaccaccacgcccacgacgcctacctgaacgccgtcgtgggaaccgccctgatcaaaaagtaccctaagctggaaagcgagttcgtgtacggcgactacaaggtgtacgacgtgcggaagatgatcgccaagagcgagcaggaaatcggcaaggctaccgccaagtacttcttctacagcaacatcatgaactttttcaagaccgaaatcaccctggccaacggcgagatcagaaagcgccctctgatcgagacaaacggcgaaaccggggagatcgtgtgggataagggcagagacttcgccacagtgcgaaaggtgctgagcatgccccaagtgaatatcgtgaaaaagaccgaggtgcagacaggcggcttcagcaaagagtctatcctgcccaagaggaacagcgacaagctgatcgccagaaagaaggactgggaccccaagaagtacggcggcttcgacagccctaccgtggcctactctgtgctggtggtggctaaggtggaaaagggcaagtccaagaaactgaagagtgtgaaagagctgctggggatcaccatcatggaaagaagcagctttgagaagaaccctatcgactttctggaagccaagggctacaaagaagtgaaaaaggacctgatcatcaagctgcctaagtactccctgttcgagctggaaaacggcagaaagagaatgctggcctctgccggcgaactgcagaagggaaacgagctggccctgcctagcaaatatgtgaacttcctgtacctggcctcccactatgagaagctgaagggcagccctgaggacaacgaacagaaacagctgtttgtggaacagcataagcactacctggacgagatcatcgagcagatcagcgagttctccaagagagtgatcctggccgacgccaatctggacaaggtgctgtctgcctacaacaagcacagggacaagcctatcagagagcaggccgagaatatcatccacctgttcaccctgacaaacctgggcgctcctgccgccttcaagtactttgacaccaccatcgaccggaagaggtacaccagcaccaaagaggtgctggacgccaccctgatccaccagagcatcaccggcctgtacgagacaagaatcgacctgtctcagctgggaggcgacaagagacctgccgccactaagaaggccggacaggccaaaaagaagaagtga

SEQ ID NO: 10 - DNA, 4218 bp, synthetic construct
  source 1..4218: mol_type = other DNA
atggccccaaagaagaagcggaaggtcggtatccacggagtcccagcagccgacaagaagtacagcatcggcctggacatcggcaccaactctgtgggctgggccgtgatcaccgacgagtacaaggtgcccagcaagaaattcaaggtgctgggcaacaccgaccggcacagcatcaagaagaacctgatcggagccctgctgttcgacagcggcgaaacagccgaggccacccggctgaagagaaccgccagaagaagatacaccagacggaagaaccggatctgctatctgcaagagatcttcagcaacgagatggccaaggtggacgacagcttcttccacagactggaagagtccttcctggtggaagaggacaagaagcacgagagacaccccatcttcggcaacatcgtggacgaggtggcctaccacgagaagtaccccaccatctaccacctgagaaagaaactggtggacagcaccgacaaggccgacctgagactgatctacctggccctggcccacatgatcaagttcagaggccacttcctgatcgagggcgacctgaaccccgacaacagcgacgtggacaagctgttcatccagctggtgcagacctacaaccagctgttcgaggaaaaccccatcaacgccagcggcgtggacgccaaggctatcctgtctgccagactgagcaagagcagaaggctggaaaatctgatcgcccagctgcccggcgagaagaagaacggcctgttcggcaacctgattgccctgagcctgggcctgacccccaacttcaagagcaacttcgacctggccgaggatgccaaactgcagctgagcaaggacacctacgacgacgacctggacaacctgctggcccagatcggcgaccagtacgccgacctgttcctggccgccaagaacctgtctgacgccatcctgctgagcgacatcctgagagtgaacaccgagatcaccaaggcccccctgagcgcctctatgatcaagagatacgacgagcaccaccaggacctgaccctgctgaaagctctcgtgcggcagcagctgcctgagaagtacaaagaaatcttcttcgaccagagcaagaacggctacgccggctacatcgatggcggcgctagccaggaagagttctacaagttcatcaagcccatcctggaaaagatggacggcaccgaggaactgctcgtgaagctgaacagagaggacctgctgagaaagcagagaaccttcgacaacggcagcatcccccaccagatccacctgggagagctgcacgctatcctgagaaggcaggaagatttttacccattcctgaaggacaaccgggaaaagatcgagaagatcctgaccttcaggatcccctactacgtgggccccctggccagaggcaacagcagattcgcctggatgaccagaaagagcgaggaaaccatcaccccctggaacttcgaggaagtggtggacaagggcgccagcgcccagagcttcatcgagagaatgacaaacttcgataagaacctgcccaacgagaaggtgctgcccaagcacagcctgctgtacgagtacttcaccgtgtacaacgagctgaccaaagtgaaatacgtgaccgagggaatgagaaagcccgccttcctgagcggcgagcagaaaaaggccatcgtggacctgctgttcaagaccaacagaaaagtgaccgtgaagcagctgaaagaggactacttcaagaaaatcgagtgcttcgactccgtggaaatctccggcgtggaagatagattcaacgcctccctgggcacataccacgatctgctgaaaattatcaaggacaaggacttcctggataacgaagagaacgaggacattctggaagatatcgtgctgaccctgacactgtttgaggaccgcgagatgatcgaggaaaggctgaaaacctacgctcacctgttcgacgacaaagtgatgaagcagctgaagagaaggcggtacaccggctggggcaggctgagcagaaagctgatcaacggcatcagagacaagcagagcggcaagacaatcctggatttcctgaagtccgacggcttcgccaaccggaacttcatgcagctgatccacgacgacagcctgacattcaaagaggacatccagaaagcccaggtgtccggccagggcgactctctgcacgagcatatcgctaacctggccggcagccccgctatcaagaagggcatcctgcagacagtgaaggtggtggacgagctcgtgaaagtgatgggcagacacaagcccgagaacatcgtgatcgagatggctagagagaaccagaccacccagaagggacagaagaactcccgcgagaggatgaagagaatcgaagagggcatcaaagagctgggcagccagatcctgaaagaacaccccgtggaaaacacccagctgcagaacgagaagctgtacctgtactacctgcagaatggccgggatatgtacgtggaccaggaactggacatcaacagactgtccgactacgatgtggaccatatcgtgcctcagagctttctgaaggacgactccatcgataacaaagtgctgactcggagcgacaagaacagaggcaagagcgacaacgtgccctccgaagaggtcgtgaagaagatgaagaactactggcgacagctgctgaacgccaagctgattacccagaggaagttcgataacctgaccaaggccgagagaggcggcctgagcgagctggataaggccggcttcatcaagaggcagctggtggaaaccagacagatcacaaagcacgtggcacagatcctggactcccggatgaacactaagtacgacgaaaacgataagctgatccgggaagtgaaagtgatcaccctgaagtccaagctggtgtccgatttccggaaggatttccagttttacaaagtgcgcgagatcaacaactaccaccacgcccacgacgcctacctgaacgccgtcgtgggaaccgccctgatcaaaaagtaccctaagctggaaagcgagttcgtgtacggcgactacaaggtgtacgacgtgcggaagatgatcgccaagagcgagcaggaaatcggcaaggctaccgccaagtacttcttctacagcaacatcatgaactttttcaagaccgaaatcaccctggccaacggcgagatcagaaagcgccctctgatcgagacaaacggcgaaaccggggagatcgtgtgggataagggcagagacttcgccacagtgcgaaaggtgctgagcatgccccaagtgaatatcgtgaaaaagaccgaggtgcagacaggcggcttcagcaaagagtctatcctgcccaagaggaacagcgacaagctgatcgccagaaagaaggactgggaccccaagaagtacggcggcttcgacagccctaccgtggcctactctgtgctggtggtggctaaggtggaaaagggcaagtccaagaaactgaagagtgtgaaagagctgctggggatcaccatcatggaaagaagcagctttgagaagaaccctatcgactttctggaagccaagggctacaaagaagtgaaaaaggacctgatcatcaagctgcctaagtactccctgttcgagctggaaaacggcagaaagagaatgctggcctctgccggcgaactgcagaagggaaacgagctggccctgcctagcaaatatgtgaacttcctgtacctggcctcccactatgagaagctgaagggcagccctgaggacaacgaacagaaacagctgtttgtggaacagcataagcactacctggacgagatcatcgagcagatcagcgagttctccaagagagtgatcctggccgacgccaatctggacaaggtgctgtctgcctacaacaagcacagggacaagcctatcagagagcaggccgagaatatcatccacctgttcaccctgacaaacctgggcgctcctgccgccttcaagtactttgacaccaccatcgaccggaagaggtacaccagcaccaaagaggtgctggacgccaccctgatccaccagagcatcaccggcctgtacgagacaagaatcgacctgtctcagctgggaggcgacaagagacctgccgccactaagaaggccggacaggccaaaaagaagaagtgagcggccgcttaatta

SEQ ID NO: 11 - protein, 1379 aa, synthetic construct
MDKKYSIGLDIGTNSVGWAVITDEYKVPSKKFKVLGNTDRHSIKKNLIGALLFDSGETAEATRLKRTARRRYTRRKNRICYLQEIFSNEMAKVDDSFFHRLEESFLVEEDKKHERHPIFGNIVDEVAYHEKYPTIYHLRKKLVDSTDKADLRLIYLALAHMIKFRGHFLIEGDLNPDNSDVDKLFIQLVQTYNQLFEENPINASGVDAKAILSARLSKSRRLENLIAQLPGEKKNGLFGNLIALSLGLTPNFKSNFDLAEDAKLQLSKDTYDDDLDNLLAQIGDQYADLFLAAKNLSDAILLSDILRVNTEITKAPLSASMIKRYDEHHQDLTLLKALVRQQLPEKYKEIFFDQSKNGYAGYIDGGASQEEFYKFIKPILEKMDGTEELLVKLNREDLLRKQRTFDNGSIPHQIHLGELHAILRRQEDFYPFLKDNREKIEKILTFRIPYYVGPLARGNSRFAWMTRKSEETITPWNFEEVVDKGASAQSFIERMTNFDKNLPNEKVLPKHSLLYEYFTVYNELTKVKYVTEGMRKPAFLSGEQKKAIVDLLFKTNRKVTVKQLKEDYFKKIECFDSVEISGVEDRFNASLGTYHDLLKIIKDKDFLDNEENEDILEDIVLTLTLFEDREMIEERLKTYAHLFDDKVMKQLKRRRYTGWGRLSRKLINGIRDKQSGKTILDFLKSDGFANRNFMQLIHDDSLTFKEDIQKAQVSGQGDSLHEHIANLAGSPAIKKGILQTVKVVDELVKVMGRHKPENIVIEMARENQTTQKGQKNSRERMKRIEEGIKELGSQILKEHPVENTQLQNEKLYLYYLQNGRDMYVDQELDINRLSDYDVDHIVPQSFLKDDSIDNKVLTRSDKNRGKSDNVPSEEVVKKMKNYWRQLLNAKLITQRKFDNLTKAERGGLSELDKAGFIKRQLVETRQITKHVAQILDSRMNTKYDENDKLIREVKVITLKSKLVSDFRKDFQFYKVREINNYHHAHDAYLNAVVGTALIKKYPKLESEFVYGDYKVYDVRKMIAKSEQEIGKATAKYFFYSNIMNFFKTEITLANGEIRKRPLIETNGETGEIVWDKGRDFATVRKVLSMPQVNIVKKTEVQTGGFSKESILPKRNSDKLIARKKDWDPKKYGGFDSPTVAYSVLVVAKVEKGKSKKLKSVKELLGITIMERSSFEKNPIDFLEAKGYKEVKKDLIIKLPKYSLFELENGRKRMLASAGELQKGNELALPSKYVNFLYLASHYEKLKGSPEDNEQKQLFVEQHKHYLDEIIEQISEFSKRVILADANLDKVLSAYNKHRDKPIREQAENIIHLFTLTNLGAPAAFKYFDTTIDRKRYTSTKEVLDATLIHQSITGLYETRIDLSQLGGDGGGSPKKKRKV

SEQ ID NO: 12 - RNA, 4514 nt, synthetic construct
  source 1..4514: mol_type = other RNA
gggtcccgcagtcggcgtccagcggctctgcttgttcgtgtgtgtgtcgttgcaggccttattcggatccatggataagaagtactcaatcgggctggatatcggaactaattccgtgggttgggcagtgatcacggatgaatacaaagtgccgtccaagaagttcaaggtcctggggaacaccgatagacacagcatcaagaaaaatctcatcggagccctgctgtttgactccggcgaaaccgcagaagcgacccggctcaaacgtaccgcgaggcgacgctacacccggcggaagaatcgcatctgctatctgcaagagatcttttcgaacgaaatggcaaaggtcgacgacagcttcttccaccgcctggaagaatctttcctggtggaggaggacaagaagcatgaacggcatcctatctttggaaacatcgtcgacgaagtggcgtaccacgaaaagtacccgaccatctaccatctgcggaagaagttggttgactcaactgacaaggccgacctcagattgatctacttggccctcgcccatatgatcaaattccgcggacacttcctgatcgaaggcgatctgaaccctgataactccgacgtggataagcttttcattcaactggtgcagacctacaaccaactgttcgaagaaaacccaatcaatgctagcggcgtcgatgccaaggccatcctgtccgcccggctgtcgaagtcgcggcgcctcgaaaacctgatcgcacagctgccgggagagaaaaagaacggacttttcggcaacttgatcgctctctcactgggactcactcccaatttcaagtccaattttgacctggccgaggacgcgaagctgcaactctcaaaggacacctacgacgacgacttggacaatttgctggcacaaattggcgatcagtacgcggatctgttccttgccgctaagaacctttcggacgcaatcttgctgtccgatatcctgcgcgtgaacaccgaaataaccaaagcgccgcttagcgcctcgatgattaagcggtacgacgagcatcaccaggatctcacgctgctcaaagcgctcgtgagacagcaactgcctgaaaagtacaaggagatcttcttcgaccagtccaagaatgggtacgcagggtacatcgatggaggcgctagccaggaagagttctataagttcatcaagccaatcctggaaaagatggacggaaccgaagaactgctggtcaagctgaacagggaggatctgctccggaaacagagaacctttgacaacggatccattccccaccagatccatctgggtgagctgcacgccatcttgcggcgccaggaggacttttacccattcctcaaggacaaccgggaaaagatcgagaaaattctgacgttccgcatcccgtattacgtgggcccactggcgcgcggcaattcgcgcttcgcgtggatgactagaaaatcagaggaaaccatcactccttggaatttcgaggaagttgtggataagggagcttcggcacaaagcttcatcgaacgaatgaccaacttcgacaagaatctcccaaacgagaaggtgcttcctaagcacagcctcctttacgaatacttcactgtctacaacgaactgactaaagtgaaatacgttactgaaggaatgaggaagccggcctttctgtccggagaacagaagaaagcaattgtcgatctgctgttcaagaccaaccgcaaggtgaccgtcaagcagcttaaagaggactacttcaagaagatcgagtgtttcgactcagtggaaatcagcggggtggaggacagattcaacgcttcgctgggaacctatcatgatctcctgaagatcatcaaggacaaggacttccttgacaacgaggagaacgaggacatcctggaagatatcgtcctgaccttgacccttttcgaggatcgcgagatgatcgaggagaggcttaagacctacgctcatctcttcgacgataaggtcatgaaacaactcaagcgccgccggtacactggttggggccgcctctcccgcaagctgatcaacggtattcgcgataaacagagcggtaaaactatcctggatttcctcaaatcggatggcttcgctaatcgtaacttcatgcaattgatccacgacgacagcctgacctttaaggaggacatccaaaaagcacaagtgtccggacagggagactcactccatgaacacatcgcgaatctggccggttcgccggcgattaagaagggaattctgcaaactgtgaaggtggtcgacgagctggtgaaggtcatgggacggcacaaaccggagaatatcgtgattgaaatggcccgagaaaaccagactacccagaagggccagaaaaactcccgcgaaaggatgaagcggatcgaagaaggaatcaaggagctgggcagccagatcctgaaagagcacccggtggaaaacacgcagctgcagaacgagaagctctacctgtactatttgcaaaatggacgggacatgtacgtggaccaagagctggacatcaatcggttgtctgattacgacgtggaccacatcgttccacagtcctttctgaaggatgactcgatcgataacaaggtgttgactcgcagcgacaagaacagagggaagtcagataatgtgccatcggaggaggtcgtgaagaagatgaagaattactggcggcagctcctgaatgcgaagctgattacccagagaaagtttgacaatctcactaaagccgagcgcggcggactctcagagctggataaggctggattcatcaaacggcagctggtcgagactcggcagattaccaagcacgtggcgcagatcttggactcccgcatgaacactaaatacgacgagaacgataagctcatccgggaagtgaaggtgattaccctgaaaagcaaacttgtgtcggactttcggaaggactttcagttttacaaagtgagagaaatcaacaactaccatcacgcgcatgacgcatacctcaacgctgtggtcggtaccgccctgatcaaaaagtaccctaaacttgaatcggagtttgtgtacggagactacaaggtctacgacgtgaggaagatgatagccaagtccgaacaggaaatcgggaaagcaactgcgaaatacttcttttactcaaacatcatgaactttttcaagactgaaattacgctggccaatggagaaatcaggaagaggccactgatcgaaactaacggagaaacgggcgaaatcgtgtgggacaagggcagggacttcgcaactgttcgcaaagtgctctctatgccgcaagtcaatattgtgaagaaaaccgaagtgcaaaccggcggattttcaaaggaatcgatcctcccaaagagaaatagcgacaagctcattgcacgcaagaaagactgggacccgaagaagtacggaggattcgattcgccgactgtcgcatactccgtcctcgtggtggccaaggtggagaagggaaagagcaaaaagctcaaatccgtcaaagagctgctggggattaccatcatggaacgatcctcgttcgagaagaacccgattgatttcctcgaggcgaagggttacaaggaggtgaagaaggatctgatcatcaaactccccaagtactcactgttcgaactggaaaatggtcggaagcgcatgctggcttcggccggagaactccaaaaaggaaatgagctggccttgcctagcaagtacgtcaacttcctctatcttgcttcgcactacgaaaaactcaaagggtcaccggaagataacgaacagaagcagcttttcgtggagcagcacaagcattatctggatgaaatcatcgaacaaatctccgagttttcaaagcgcgtgatcctcgccgacgccaacctcgacaaagtcctgtcggcctacaataagcatagagataagccgatcagagaacaggccgagaacattatccacttgttcaccctgactaacctgggagccccagccgccttcaagtacttcgatactactatcgatcgcaaaagatacacgtccaccaaggaagttctggacgcgaccctgatccaccaaagcatcactggactctacgaaactaggatcgatctgtcgcagctgggtggcgatggcggtggatctccgaaaaagaagagaaaggtgtaatgagctagccatcacatttaaaagcatctcagcctaccatgagaataagagaaagaaaatgaagatcaatagcttattcatctctttttctttttcgttggtgtaaagccaacaccctgtctaaaaaacataaatttctttaatcattttgcctcttttctctgtgcttcaattaataaaaaatggaaagaacctcgagaaaaaaaaaaaaaaaaaaaaaaaaaaaaaaaaaaaaaaaaaaaaaaaaaaaaaaaaaaaaaaaaaaaaaaaaaaaaaaaaaaaaaaaaaaaaaaaaaaaatctag

SEQ ID NO: 13 - protein, 7 aa, synthetic construct
PKKKRKV

SEQ ID NO: 14 - protein, 7 aa, synthetic construct
PKKKRRV

SEQ ID NO: 15 - protein, 16 aa, synthetic construct
KRPAATKKAGQAKKKK

SEQ ID NO: 16 - RNA, 16 nt, synthetic construct
  source 1..16: mol_type = other RNA
gttttagagctatgct

SEQ ID NO: 17 - RNA, 22 nt, synthetic construct
  source 1..22: mol_type = other RNA
gttttagagctatgctgttttg

SEQ ID NO: 18 - RNA, 67 nt, synthetic construct
  source 1..67: mol_type = other RNA
agcatagcaagttaaaataaggctagtccgttatcaacttgaaaaagtggcaccgagtcggtgcttt

SEQ ID NO: 19 - RNA, 72 nt, synthetic construct
  source 1..72: mol_type = other RNA
aaacagcatagcaagttaaaataaggctagtccgttatcaacttgaaaaagtggcaccgagtcggtgctttt

SEQ ID NO: 20 - RNA, 82 nt, synthetic construct
  source 1..82: mol_type = other RNA
gttggaaccattcaaaacagcatagcaagttaaaataaggctagtccgttatcaacttgaaaaagtggcaccgagtcggtgc

SEQ ID NO: 21 - RNA, 77 nt, synthetic construct
  source 1..77: mol_type = other RNA
gttttagagctagaaatagcaagttaaaataaggctagtccgttatcaacttgaaaaagtggcaccgagtcggtgct

SEQ ID NO: 22 - RNA, 82 nt, synthetic construct; identical to SEQ ID NO: 20
  source 1..82: mol_type = other RNA

SEQ ID NO: 23 - RNA, 76 nt, synthetic construct
  source 1..76: mol_type = other RNA
gttttagagctagaaatagcaagttaaaataaggctagtccgttatcaacttgaaaaagtggcaccgagtcggtgc

SEQ ID NO: 24 - RNA, 86 nt, synthetic construct
  source 1..86: mol_type = other RNA
gtttaagagctatgctggaaacagcatagcaagtttaaataaggctagtccgttatcaacttgaaaaagtggcaccgagtcggtgc

SEQ ID NO: 25 - RNA, 83 nt, synthetic construct
  source 1..83: mol_type = other RNA
gttttagagctagaaatagcaagttaaaataaggctagtccgttatcaacttgaaaaagtggcaccgagtcggtgcttttttt

SEQ ID NO: 26 - RNA, 80 nt, synthetic construct
  source 1..80: mol_type = other RNA
gttttagagctagaaatagcaagttaaaataaggctagtccgttatcaacttgaaaaagtggcaccgagtcggtgctttt

SEQ ID NO: 27 - RNA, 92 nt, synthetic construct
  source 1..92: mol_type = other RNA
gtttaagagctatgctggaaacagcatagcaagtttaaataaggctagtccgttatcaacttgaaaaagtggcaccgagtcggtgctttttt

SEQ ID NO: 28 - RNA, 68 nt, synthetic construct
  source 1..68: mol_type = other RNA
gttttagagctagaaatagcaagttaaaataaggctagtccgttatcaacttggcaccgagtcggtgc

SEQ ID NO: 29 - RNA, 100 nt, synthetic construct
  source 1..100: mol_type = other RNA
  misc_difference 1..20: note = n = a, c, g, or t/u
nnnnnnnnnnnnnnnnnnnngttttagagctagaaatagcaagttaaaataaggctagtccgttatcaacttgaaaaagtggcaccgagtcggtgctttt

SEQ ID NO: 30 - RNA, 20 nt, synthetic construct
  source 1..20: mol_type = other RNA
gagcaacctcactcttgtct

SEQ ID NO: 31 - RNA, 20 nt, synthetic construct
  source 1..20: mol_type = other RNA
atgcatttgtttcaaaatat

SEQ ID NO: 32 - RNA, 20 nt, synthetic construct
  source 1..20: mol_type = other RNA
tgcatttgtttcaaaatatt

SEQ ID NO: 33 - RNA, 20 nt, synthetic construct
  source 1..20: mol_type = other RNA
atttatgagatcaacagcac

SEQ ID NO: 34 - RNA, 20 nt, synthetic construct
  source 1..20: mol_type = other RNA
gatcaacagcacaggttttg

SEQ ID NO: 35 - RNA, 20 nt, synthetic construct
  source 1..20: mol_type = other RNA
ttaaataaagcatagtgcaa

SEQ ID NO: 36 - RNA, 20 nt, synthetic construct
  source 1..20: mol_type = other RNA
taaagcatagtgcaatggat

SEQ ID NO: 37 - RNA, 20 nt, synthetic construct
  source 1..20: mol_type = other RNA
tagtgcaatggataggtctt

SEQ ID NO: 38 - RNA, 20 nt, synthetic construct
  source 1..20: mol_type = other RNA
tactaaaactttattttact

SEQ ID NO: 39 - RNA, 20 nt, synthetic construct
  source 1..20: mol_type = other RNA
aaagttgaacaatagaaaaa

SEQ ID NO: 40 - RNA, 20 nt, synthetic construct
  source 1..20: mol_type = other RNA
aatgcataatctaagtcaaa

SEQ ID NO: 41 - RNA, 20 nt, synthetic construct
  source 1..20: mol_type = other RNA
taataaaattcaaacatcct

SEQ ID NO: 42 - RNA, 20 nt, synthetic construct
  source 1..20: mol_type = other RNA
gcatctttaaagaattattt

SEQ ID NO: 43 - RNA, 20 nt, synthetic construct
  source 1..20: mol_type = other RNA
tttggcatttatttctaaaa

SEQ ID NO: 44 - RNA, 20 nt, synthetic construct
  source 1..20: mol_type = other RNA
tgtatttgtgaagtcttaca

SEQ ID NO: 45 - RNA, 20 nt, synthetic construct
  source 1..20: mol_type = other RNA
tcctaggtaaaaaaaaaaaa

SEQ ID NO: 46 - RNA, 20 nt, synthetic construct
  source 1..20: mol_type = other RNA
taattttcttttgcgcacta

SEQ ID NO: 47 - RNA, 20 nt, synthetic construct
  source 1..20: mol_type = other RNA
tgactgaaacttcacagaat

SEQ ID NO: 48 - RNA, 20 nt, synthetic construct
  source 1..20: mol_type = other RNA
gactgaaacttcacagaata

SEQ ID NO: 49 - RNA, 20 nt, synthetic construct
  source 1..20: mol_type = other RNA
ttcattttagtctgtcttct

SEQ ID NO: 50 - RNA, 20 nt, synthetic construct
  source 1..20: mol_type = other RNA
attatctaagtttgaatata

SEQ ID NO: 51 - RNA, 20 nt, synthetic construct
  source 1..20: mol_type = other RNA
aatttttaaaatagtattct

SEQ ID NO: 52 - RNA, 20 nt, synthetic construct
  source 1..20: mol_type = other RNA
tgaattattcttctgtttaa

SEQ ID NO: 53 - RNA, 20 nt, synthetic construct
  source 1..20: mol_type = other RNA
atcatcctgagtttttctgt

SEQ ID NO: 54 - RNA, 20 nt, synthetic construct
  source 1..20: mol_type = other RNA
ttactaaaactttattttac

SEQ ID NO: 55 - RNA, 20 nt, synthetic construct
  source 1..20: mol_type = other RNA
acctttttttttttttacct

SEQ ID NO: 56 - RNA, 20 nt, synthetic construct
  source 1..20: mol_type = other RNA
agtgcaatggataggtcttt

SEQ ID NO: 57 - RNA, 20 nt, synthetic construct
  source 1..20: mol_type = other RNA
tgattcctacagaaaaactc

SEQ ID NO: 58 - RNA, 20 nt, synthetic construct
  source 1..20: mol_type = other RNA
tgggcaagggaagaaaaaaa

SEQ ID NO: 59 - RNA, 20 nt, synthetic construct
  source 1..20: mol_type = other RNA
cctcactcttgtctgggcaa

SEQ ID NO: 60 - RNA, 20 nt, synthetic construct
  source 1..20: mol_type = other RNA
acctcactcttgtctgggca

SEQ ID NO: 61 - RNA, 20 nt, synthetic construct
  source 1..20: mol_type = other RNA
tgagcaacctcactcttgtc

SEQ ID NO: 62 - RNA, 100 nt, synthetic construct
  source 1..100: mol_type = other RNA
gagcaacctcactcttgtctgttttagagctagaaatagcaagttaaaataaggctagtccgttatcaacttgaaaaagtggcaccgagtcggtgctttt

SEQ ID NO: 63 - RNA, 100 nt, synthetic construct
  source 1..100: mol_type = other RNA
atgcatttgtttcaaaatatgttttagagctagaaatagcaagttaaaataaggctagtccgttatcaacttgaaaaagtggcaccgagtcggtgctttt

SEQ ID NO: 64 - RNA, 100 nt, synthetic construct
  source 1..100: mol_type = other RNA
tgcatttgtttcaaaatattgttttagagctagaaatagcaagttaaaataaggctagtccgttatcaacttgaaaaagtggcaccgagtcggtgctttt

SEQ ID NO: 65 - RNA, 100 nt, synthetic construct
  source 1..100: mol_type = other RNA
atttatgagatcaacagcacgttttagagctagaaatagcaagttaaaataaggctagtccgttatcaacttgaaaaagtggcaccgagtcggtgctttt

SEQ ID NO: 66 - RNA, 100 nt, synthetic construct
  source 1..100: mol_type = other RNA
gatcaacagcacaggttttggttttagagctagaaatagcaagttaaaataaggctagtccgttatcaacttgaaaaagtggcaccgagtcggtgctttt

SEQ ID NO: 67 - RNA, 100 nt, synthetic construct
  source 1..100: mol_type = other RNA
ttaaataaagcatagtgcaagttttagagctagaaatagcaagttaaaataaggctagtccgttatcaacttgaaaaagtggcaccgagtcggtgctttt

SEQ ID NO: 68 - RNA, 100 nt, synthetic construct
  source 1..100: mol_type = other RNA
taaagcatagtgcaatggatgttttagagctagaaatagcaagttaaaataaggctagtccgttatcaacttgaaaaagtggcaccgagtcggtgctttt

SEQ ID NO: 69 - RNA, 100 nt, synthetic construct
  source 1..100: mol_type = other RNA
tagtgcaatggataggtcttgttttagagctagaaatagcaagttaaaataaggctagtccgttatcaacttgaaaaagtggcaccgagtcggtgctttt

SEQ ID NO: 70 - RNA, 100 nt, synthetic construct
  source 1..100: mol_type = other RNA
tactaaaactttattttactgttttagagctagaaatagcaagttaaaataaggctagtccgttatcaacttgaaaaagtggcaccgagtcggtgctttt

SEQ ID NO: 71 - RNA, 100 nt, synthetic construct
  source 1..100: mol_type = other RNA
aaagttgaacaatagaaaaagttttagagctagaaatagcaagttaaaataaggctagtccgttatcaacttgaaaaagtggcaccgagtcggtgctttt

SEQ ID NO: 72 - RNA, 100 nt, synthetic construct
  source 1..100: mol_type = other RNA
aatgcataatctaagtcaaagttttagagctagaaatagcaagttaaaataaggctagtccgttatcaacttgaaaaagtggcaccgagtcggtgctttt

SEQ ID NO: 73 - RNA, 100 nt, synthetic construct
  source 1..100: mol_type = other RNA
taataaaattcaaacatcctgttttagagctagaaatagcaagttaaaataaggctagtccgttatcaacttgaaaaagtggcaccgagtcggtgctttt

SEQ ID NO: 74 - RNA, 100 nt, synthetic construct
  source 1..100: mol_type = other RNA
gcatctttaaagaattatttgttttagagctagaaatagcaagttaaaataaggctagtccgttatcaacttgaaaaagtggcaccgagtcggtgctttt

SEQ ID NO: 75 - RNA, 100 nt, synthetic construct
  source 1..100: mol_type = other RNA
tttggcatttatttctaaaagttttagagctagaaatagcaagttaaaataaggctagtccgttatcaacttgaaaaagtggcaccgagtcggtgctttt

SEQ ID NO: 76 - RNA, 100 nt, synthetic construct
  source 1..100: mol_type = other RNA
tgtatttgtgaagtcttacagttttagagctagaaatagcaagttaaaataaggctagtccgttatcaacttgaaaaagtggcaccgagtcggtgctttt

SEQ ID NO: 77 - RNA, 100 nt, synthetic construct
  source 1..100: mol_type = other RNA
tcctaggtaaaaaaaaaaaagttttagagctagaaatagcaagttaaaataaggctagtccgttatcaacttgaaaaagtggcaccgagtcggtgctttt

SEQ ID NO: 78 - RNA, 100 nt, synthetic construct
  source 1..100: mol_type = other RNA
taattttcttttgcgcactagttttagagctagaaatagcaagttaaaataaggctagtccgttatcaacttgaaaaagtggcaccgagtcggtgctttt

SEQ ID NO: 79 - RNA, 100 nt, synthetic construct
  source 1..100: mol_type = other RNA
tgactgaaacttcacagaatgttttagagctagaaatagcaagttaaaataaggctagtccgttatcaacttgaaaaagtggcaccgagtcggtgctttt

SEQ ID NO: 80 - RNA, 100 nt, synthetic construct
  source 1..100: mol_type = other RNA
gactgaaacttcacagaatagttttagagctagaaatagcaagttaaaataaggctagtccgttatcaacttgaaaaagtggcaccgagtcggtgctttt

SEQ ID NO: 81 - RNA, 100 nt, synthetic construct
  source 1..100: mol_type = other RNA
ttcattttagtctgtcttctgttttagagctagaaatagcaagttaaaataaggctagtccgttatcaacttgaaaaagtggcaccgagtcggtgctttt

SEQ ID NO: 82 - RNA, 100 nt, synthetic construct
  source 1..100: mol_type = other RNA
attatctaagtttgaatatagttttagagctagaaatagcaagttaaaataaggctagtccgttatcaacttgaaaaagtggcaccgagtcggtgctttt

SEQ ID NO: 83 - RNA, 100 nt, synthetic construct
  source 1..100: mol_type = other RNA
aatttttaaaatagtattctgttttagagctagaaatagcaagttaaaataaggctagtccgttatcaacttgaaaaagtggcaccgagtcggtgctttt

SEQ ID NO: 84 - RNA, 100 nt, synthetic construct
  source 1..100: mol_type = other RNA
tgaattattcttctgtttaagttttagagctagaaatagcaagttaaaataaggctagtccgttatcaacttgaaaaagtggcaccgagtcggtgctttt

SEQ ID NO: 85 - RNA, 100 nt, synthetic construct
  source 1..100: mol_type = other RNA
atcatcctgagtttttctgtgttttagagctagaaatagcaagttaaaataaggctagtccgttatcaacttgaaaaagtggcaccgagtcggtgctttt

SEQ ID NO: 86 - RNA, 100 nt, synthetic construct
  source 1..100: mol_type = other RNA
ttactaaaactttattttacgttttagagctagaaatagcaagttaaaataaggctagtccgttatcaacttgaaaaagtggcaccgagtcggtgctttt

SEQ ID NO: 87 - RNA, 100 nt, synthetic construct
  source 1..100: mol_type = other RNA
acctttttttttttttacctgttttagagctagaaatagcaagttaaaataaggctagtccgttatcaacttgaaaaagtggcaccgagtcggtgctttt

SEQ ID NO: 88 - RNA, 100 nt, synthetic construct
  source 1..100: mol_type = other RNA
agtgcaatggataggtctttgttttagagctagaaatagcaagttaaaataaggctagtccgttatcaacttgaaaaagtggcaccgagtcggtgctttt

SEQ ID NO: 89 - RNA, 100 nt, synthetic construct
  source 1..100: mol_type = other RNA
tgattcctacagaaaaactcgttttagagctagaaatagcaagttaaaataaggctagtccgttatcaacttgaaaaagtggcaccgagtcggtgctttt

SEQ ID NO: 90 - RNA, 100 nt, synthetic construct
  source 1..100: mol_type = other RNA
tgggcaagggaagaaaaaaagttttagagctagaaatagcaagttaaaataaggctagtccgttatcaacttgaaaaagtggcaccgagtcggtgctttt

SEQ ID NO: 91 - RNA, 100 nt, synthetic construct
  source 1..100: mol_type = other RNA
cctcactcttgtctgggcaagttttagagctagaaatagcaagttaaaataaggctagtccgttatcaacttgaaaaagtggcaccgagtcggtgctttt

SEQ ID NO: 92 - RNA, 100 nt, synthetic construct
  source 1..100: mol_type = other RNA
acctcactcttgtctgggcagttttagagctagaaatagcaagttaaaataaggctagtccgttatcaacttgaaaaagtggcaccgagtcggtgctttt

SEQ ID NO: 93 - RNA, 100 nt, synthetic construct
  source 1..100: mol_type = other RNA
tgagcaacctcactcttgtcgttttagagctagaaatagcaagttaaaataaggctagtccgttatcaacttgaaaaagtggcaccgagtcggtgctttt

SEQ ID NO: 94 - RNA, 100 nt, synthetic construct; identical to SEQ ID NO: 62
  source 1..100: mol_type = other RNA

SEQ ID NO: 95 - RNA, 100 nt, synthetic construct; identical to SEQ ID NO: 63
  source 1..100: mol_type = other RNA

SEQ ID NO: 96 - RNA, 100 nt, synthetic construct; identical to SEQ ID NO: 64
  source 1..100: mol_type = other RNA

SEQ ID NO: 97 - RNA, 100 nt, synthetic construct; identical to SEQ ID NO: 65
  source 1..100: mol_type = other RNA

SEQ ID NO: 98 - RNA, 100 nt, synthetic construct; identical to SEQ ID NO: 66
  source 1..100: mol_type = other RNA

SEQ ID NO: 99 - RNA, 100 nt, synthetic construct; identical to SEQ ID NO: 67
  source 1..100: mol_type = other RNA

SEQ ID NO: 100 - RNA, 100 nt, synthetic construct; identical to SEQ ID NO: 68
  source 1..100: mol_type = other RNA

SEQ ID NO: 101 - RNA, 100 nt, synthetic construct; identical to SEQ ID NO: 69
  source 1..100: mol_type = other RNA

SEQ ID NO: 102 - RNA, 100 nt, synthetic construct; identical to SEQ ID NO: 70
  source 1..100: mol_type = other RNA

SEQ ID NO: 103 - RNA, 100 nt, synthetic construct; identical to SEQ ID NO: 71
  source 1..100: mol_type = other RNA

SEQ ID NO: 104 - RNA, 100 nt, synthetic construct; identical to SEQ ID NO: 72
  source 1..100: mol_type = other RNA

SEQ ID NO: 105 - RNA, 100 nt, synthetic construct; identical to SEQ ID NO: 73
  source 1..100: mol_type = other RNA

SEQ ID NO: 106 - RNA, 100 nt, synthetic construct; identical to SEQ ID NO: 74
  source 1..100: mol_type = other RNA

SEQ ID NO: 107 - RNA, 100 nt, synthetic construct; identical to SEQ ID NO: 75
  source 1..100: mol_type = other RNA

SEQ ID NO: 108 - RNA, 100 nt, synthetic construct; identical to SEQ ID NO: 76
  source 1..100: mol_type = other RNA

SEQ ID NO: 109 - RNA, 100 nt, synthetic construct; identical to SEQ ID NO: 77
  source 1..100: mol_type = other RNA

SEQ ID NO: 110 - RNA, 100 nt, synthetic construct; identical to SEQ ID NO: 78
  source 1..100: mol_type = other RNA

SEQ ID NO: 111 - RNA, 100 nt, synthetic construct; identical to SEQ ID NO: 79
  source 1..100: mol_type = other RNA

SEQ ID NO: 112 - RNA, 100 nt, synthetic construct; identical to SEQ ID NO: 80
  source 1..100: mol_type = other RNA

SEQ ID NO: 113 - RNA, 100 nt, synthetic construct; identical to SEQ ID NO: 81
  source 1..100: mol_type = other RNA

SEQ ID NO: 114 - RNA, 100 nt, synthetic construct; identical to SEQ ID NO: 82
  source 1..100: mol_type = other RNA

SEQ ID NO: 115 - RNA, 100 nt, synthetic construct; identical to SEQ ID NO: 83
  source 1..100: mol_type = other RNA

SEQ ID NO: 116 - RNA, 100 nt, synthetic construct; identical to SEQ ID NO: 84
  source 1..100: mol_type = other RNA

SEQ ID NO: 117 - RNA, 100 nt, synthetic construct; identical to SEQ ID NO: 85
  source 1..100: mol_type = other RNA

SEQ ID NO: 118 - RNA, 100 nt, synthetic construct; identical to SEQ ID NO: 86
  source 1..100: mol_type = other RNA

SEQ ID NO: 119 - RNA, 100 nt, synthetic construct; identical to SEQ ID NO: 87
  source 1..100: mol_type = other RNA

SEQ ID NO: 120 - RNA, 100 nt, synthetic construct; identical to SEQ ID NO: 88
  source 1..100: mol_type = other RNA

SEQ ID NO: 121 - RNA, 100 nt, synthetic construct; identical to SEQ ID NO: 89
  source 1..100: mol_type = other RNA

SEQ ID NO: 122 - RNA, 100 nt, synthetic construct; identical to SEQ ID NO: 90
  source 1..100: mol_type = other RNA

SEQ ID NO: 123 - RNA, 100 nt, synthetic construct; identical to SEQ ID NO: 91
  source 1..100: mol_type = other RNA

SEQ ID NO: 124 - RNA, 100 nt, synthetic construct; identical to SEQ ID NO: 92
  source 1..100: mol_type = other RNA

SEQ ID NO: 125 - RNA, 100 nt, synthetic construct; identical to SEQ ID NO: 93
  source 1..100: mol_type = other RNA

SEQ ID NO: 126 - DNA, 20 bp, synthetic construct
  source 1..20: mol_type = other DNA
gagcaacctcactcttgtct

SEQ ID NO: 127 - DNA, 20 bp, synthetic construct
  source 1..20: mol_type = other DNA
atgcatttgtttcaaaatat

SEQ ID NO: 128 - DNA, 20 bp, synthetic construct
  source 1..20: mol_type = other DNA
tgcatttgtttcaaaatatt

SEQ ID NO: 129 - DNA, 20 bp, synthetic construct
  source 1..20: mol_type = other DNA
atttatgagatcaacagcac

SEQ ID NO: 130 - DNA, 20 bp, synthetic construct
  source 1..20: mol_type = other DNA
gatcaacagcacaggttttg

SEQ ID NO: 131 - DNA, 20 bp, synthetic construct
  source 1..20: mol_type = other DNA
ttaaataaagcatagtgcaa

SEQ ID NO: 132 - DNA, 20 bp, synthetic construct
  source 1..20: mol_type = other DNA
taaagcatagtgcaatggat

SEQ ID NO: 133 - DNA, 20 bp, synthetic construct
  source 1..20: mol_type = other DNA
tagtgcaatggataggtctt

SEQ ID NO: 134 - DNA, 20 bp, synthetic construct
  source 1..20: mol_type = other DNA
tactaaaactttattttact

SEQ ID NO: 135 - DNA, 20 bp, synthetic construct
  source 1..20: mol_type = other DNA
aaagttgaacaatagaaaaa

SEQ ID NO: 136 - DNA, 20 bp, synthetic construct
  source 1..20: mol_type = other DNA
aatgcataatctaagtcaaa

SEQ ID NO: 137 - DNA, 20 bp, synthetic construct
  source 1..20: mol_type = other DNA
taataaaattcaaacatcct

SEQ ID NO: 138 - DNA, 20 bp, synthetic construct
  source 1..20: mol_type = other DNA
gcatctttaaagaattattt

SEQ ID NO: 139 - DNA, 20 bp, synthetic construct
  source 1..20: mol_type = other DNA
tttggcatttatttctaaaa

SEQ ID NO: 140 - DNA, 20 bp, synthetic construct
  source 1..20: mol_type = other DNA
tgtatttgtgaagtcttaca

SEQ ID NO: 141 - DNA, 20 bp, synthetic construct
  source 1..20: mol_type = other DNA
tcctaggtaaaaaaaaaaaa

SEQ ID NO: 142 - DNA, 20 bp, synthetic construct
  source 1..20: mol_type = other DNA
taattttcttttgcgcacta

SEQ ID NO: 143 - DNA, 20 bp, synthetic construct
  source 1..20: mol_type = other DNA
tgactgaaacttcacagaat

SEQ ID NO: 144 - DNA, 20 bp, synthetic construct
  source 1..20: mol_type = other DNA
gactgaaacttcacagaata

SEQ ID NO: 145 - DNA, 20 bp, synthetic construct
  source 1..20: mol_type = other DNA
ttcattttagtctgtcttct

SEQ ID NO: 146 - DNA, 20 bp, synthetic construct
  source 1..20: mol_type = other DNA
attatctaagtttgaatata

SEQ ID NO: 147 - DNA, 20 bp, synthetic construct
  source 1..20: mol_type = other DNA
aatttttaaaatagtattct

SEQ ID NO: 148 - DNA, 20 bp, synthetic construct
  source 1..20: mol_type = other DNA
tgaattattcttctgtttaa

SEQ ID NO: 149 - DNA, 20 bp, synthetic construct
  source 1..20: mol_type = other DNA
atcatcctgagtttttctgt

SEQ ID NO: 150 - DNA, 20 bp, synthetic construct
  source 1..20: mol_type = other DNA
ttactaaaactttattttac

SEQ ID NO: 151 - DNA, 20 bp, synthetic construct
  source 1..20: mol_type = other DNA
acctttttttttttttacct

SEQ ID NO: 152 - DNA, 20 bp, synthetic construct
  source 1..20: mol_type = other DNA
agtgcaatggataggtcttt

SEQ ID NO: 153 - DNA, 20 bp, synthetic construct
  source 1..20: mol_type = other DNA
tgattcctacagaaaaactc

SEQ ID NO: 154 - DNA, 20 bp, synthetic construct
  source 1..20: mol_type = other DNA
tgggcaagggaagaaaaaaa

SEQ ID NO: 155 - DNA, 20 bp, synthetic construct
  source 1..20: mol_type = other DNA
cctcactcttgtctgggcaa

SEQ ID NO: 156 - DNA, 20 bp, synthetic construct
  source 1..20: mol_type = other DNA
acctcactcttgtctgggca

SEQ ID NO: 157 - DNA, 20 bp, synthetic construct
  source 1..20: mol_type = other DNA
tgagcaacctcactcttgtc

SEQ ID NO: 158 - DNA, 145 bp, synthetic construct
  source 1..145: mol_type = other DNA
ttggccactccctctctgcgcgctcgctcgctcactgaggccgggcgaccaaaggtcgcccgacgcccgggctttgcccgggcggcctcagtgagcgagcgagcgcgcagagagggagtggccaactccatcactaggggttcct

SEQ ID NO: 159 - DNA, 141 bp, synthetic construct
  source 1..141: mol_type = other DNA
cctgcaggcagctgcgcgctcgctcgctcactgaggccgcccgggcaaagcccgggcgtcgggcgacctttggtcgcccggcctcagtgagcgagcgagcgcgcagagagggagtggccaactccatcactaggggttcct

SEQ ID NO: 160 - DNA, 130 bp, synthetic construct
  source 1..130: mol_type = other DNA
ctgcgcgctcgctcgctcactgaggccgcccgggcaaagcccgggcgtcgggcgacctttggtcgcccggcctcagtgagcgagcgagcgcgcagagagggagtggccaactccatcactaggggttcct

SEQ ID NO: 161 - DNA, 131 bp, synthetic construct
  source 1..131: mol_type = other DNA
cagacatgataagatacattgatgagtttggacaaaccacaactagaatgcagtgaaaaaaatgctttatttgtgaaatttgtgatgctattgctttatttgtaaccattataagctgcaataaacaagtt

SEQ ID NO: 162 - DNA, 224 bp, synthetic construct
  source 1..224: mol_type = other DNA
ctgtgccttctagttgccagccatctgttgtttgcccctcccccttgccttccttgaccctggaaggtgccactcccactgtcctttcctaataaaatgaggaaattgcatcacattgtctgagtaggtgtcattctattctggggggtggggtggggcaggacagcaagggggaggattgggaagacaatagcaggcatgctggggatgcagtgggctctatg

SEQ ID NO: 163 - DNA, 100 bp, synthetic construct
  source 1..100: mol_type = other DNA
taggtcagtgaagagaagaacaaaaagcagcatattacagttagttgtcttcatcaatctttaaatatgttgtgtggtttttctctccctgtttccacag

SEQ ID NO: 164 - RNA, 20 nt, synthetic construct
  source 1..20: mol_type = other RNA
cactcttgtctgtggaaaca

SEQ ID NO: 165 - DNA, 20 bp, synthetic construct
  source 1..20: mol_type = other DNA
cactcttgtctgtggaaaca

SEQ ID NO: 166 - RNA, 100 nt, synthetic construct
  source 1..100: mol_type = other RNA
cactcttgtctgtggaaacagttttagagctagaaatagcaagttaaaataaggctagtccgttatcaacttgaaaaagtggcaccgagtcggtgctttt

SEQ ID NO: 167 - RNA, 100 nt, synthetic construct; identical to SEQ ID NO: 166
  source 1..100: mol_type = other RNA

SEQ ID NO: 168 - DNA, 145 bp, synthetic construct
  source 1..145: mol_type = other DNA
aggaacccctagtgatggagttggccactccctctctgcgcgctcgctcgctcactgaggccgcccgggcaaagcccgggcgtcgggcgacctttggtcgcccggcctcagtgagcgagcgagcgcgcagagagggagtggccaa

SEQ ID NO: 169 - DNA, 230 bp, synthetic construct
  source 1..230: mol_type = other DNA
taatcagccataccacatttgtagaggttttacttgctttaaaaaacctcccacacctccccctgaacctgaaacataaaatgaatgcaattgttgttgttaacttgtttattgcagcttataatggttacaaataaagcaatagcatcacaaatttcacaaataaagcatttttttcactgcattctagttgtggtttgtccaaactcatcaatgtatcttatcatgtc

SEQ ID NO: 170 - DNA, 363 bp, synthetic construct
  source 1..363: mol_type = other DNA
gaggtgcagctggtggagtctgggggaggcttggtacagcctggggggtccctgagactctcctgtgcagcctctggattcgcctttagcagctatgccatgacctgggtccgacaggctccagggaaggggctggagtgggtctcagttatcagtggtactggtggtagtacatactacgcagactccgtgaagggccggttcaccatctccagagacaattccaagaacacgctgtatctacaaatgaacagcctgagagccgaggacacggccgtatattactgtgcgaaagggggagcagctcgtagaatggaatacttccagtactggggccagggcaccctggtcaccgtctcctca

SEQ ID NO: 171 - protein, 121 aa, synthetic construct
EVQLVESGGGLVQPGGSLRLSCAASGFAFSSYAMTWVRQAPGKGLEWVSVISGTGGSTYYADSVKGRFTISRDNSKNTLYLQMNSLRAEDTAVYYCAKGGAARRMEYFQYWGQGTLVTVSS

SEQ ID NO: 172 - protein, 8 aa, synthetic construct
GFAFSSYA

SEQ ID NO: 173 - protein, 8 aa, synthetic construct
ISGTGGST

SEQ ID NO: 174 - protein, 14 aa, synthetic construct
AKGGAARRMEYFQY

SEQ ID NO: 175 - DNA, 321 bp, synthetic construct
  source 1..321: mol_type = other DNA
gacatccagatgacccagtctccatcctccctgtctgcatctgtaggagacagagtcaccatcacttgccgggcgagtcagggcattagcaattatttagcctggtatcagcagaaaccagggaaagttcctaacctccttatctatgctgcatccactttgcaatcaggggtcccatctcgattcagtggcagtggatctgggacagatttcactctcaccatcagcagcctgcagcctgaagatgttgcaacttattactgtcaaaagtataacagtgcccctctcactttcggcggagggaccaaggtggagatcaaa

SEQ ID NO: 176 - protein, 107 aa, synthetic construct
DIQMTQSPSSLSASVGDRVTITCRASQGISNYLAWYQQKPGKVPNLLIYAASTLQSGVPSRFSGSGSGTDFTLTISSLQPEDVATYYCQKYNSAPLTFGGGTKVEIK

SEQ ID NO: 177 - protein, 6 aa, synthetic construct
QGISNY

SEQ ID NO: 178 - skipped

SEQ ID NO: 179 - protein, 9 aa, synthetic construct
QKYNSAPLT

SEQ ID NO: 180 - DNA, 363 bp, synthetic construct
  source 1..363: mol_type = other DNA
gaggtgcagctggtggagtctgggggaggcttggtacagcctggggggtccctgagactctcctgtgcagcctctggattcacctttaacagctatgccatgacctgggtccgccaggctccagggaaggggctggagtgggtctcatttattggtggtagtactggtaacacatactacgcaggctccgtgaagggccggttcaccatctccagcgacaattccaagaagacgctgtatctgcaaatgaacagcctgagagccgaggacacggccgtatattactgtgcgaaagggggagcagctcgtagaatggaatacttccagcactggggccagggcaccctggtcaccgtctcctca

SEQ ID NO: 181 - protein, 121 aa, synthetic construct
EVQLVESGGGLVQPGGSLRLSCAASGFTFNSYAMTWVRQAPGKGLEWVSFIGGSTGNTYYAGSVKGRFTISSDNSKKTLYLQMNSLRAEDTAVYYCAKGGAARRMEYFQHWGQGTLVTVSS

SEQ ID NO: 182 - protein, 8 aa, synthetic construct
GFTFNSYA

SEQ ID NO: 183 - protein, 8 aa, synthetic construct
IGGSTGNT

SEQ ID NO: 184 - protein, 14 aa, synthetic construct
AKGGAARRMEYFQH

SEQ ID NO: 185 - DNA, 321 bp, synthetic construct
  source 1..321: mol_type = other DNA
gacatccagatgacccagtctccatcctccctgtctgcatctataggagacagagtcaccatcacttgccgggcgagtcagggcattagcaattatttagcctggtatcaacagaaaccagggaaagttcctaagctcctgatctatgctgcatccactttgcaatcaggggtcccatctcggttcagtggcagtggatctgggacagatttcactctcaccatcagcagcctgcagcctgaagatgttgcaacttattactgtcaaaaccataacagtgtccctctcactttcggcggagggaccaaggtggagatcaaa

SEQ ID NO: 186 - protein, 107 aa, synthetic construct
DIQMTQSPSSLSASIGDRVTITCRASQGISNYLAWYQQKPGKVPKLLIYAASTLQSGVPSRFSGSGSGTDFTLTISSLQPEDVATYYCQNHNSVPLTFGGGTKVEIK

SEQ ID NO: 187 - protein, 6 aa, synthetic construct
QGISNY

SEQ ID NO: 188 - skipped

SEQ ID NO: 189 - protein, 9 aa, synthetic construct
QNHNSVPLT

SEQ ID NO: 190 - DNA, 366 bp, synthetic construct
  source 1..366: mol_type = other DNA
caggtgcagctggtggagtctgggggaggcgtggtccagcctgggaggtccctgagactctcctgtgcagcgtctggattcaccttcactacctatggcatgcactgggtccgccaggctccaggcaaggggctggagtgggtggctgttatatggtatgatggaagtaataaatattatggagactccgtgaagggccgattcaccatctccagagacaattccaagaacacactgtatctgcaaatgaacagcctgagagtcgacgacacggctgtttattactgtacgagaacccatggctataccaggtcgtcggacggttttgactactggggccagggaaccctggtcaccgtctcctca

SEQ ID NO: 191 - protein, 122 aa, synthetic construct
QVQLVESGGGVVQPGRSLRLSCAASGFTFTTYGMHWVRQAPGKGLEWVAVIWYDGSNKYYGDSVKGRFTISRDNSKNTLYLQMNSLRVDDTAVYYCTRTHGYTRSSDGFDYWGQGTLVTVSS

SEQ ID NO: 192 - protein, 8 aa, synthetic construct
GFTFTTYG

SEQ ID NO: 193 - protein, 8 aa, synthetic construct
IWYDGSNK

SEQ ID NO: 194 - protein, 15 aa, synthetic construct
TRTHGYTRSSDGFDY

SEQ ID NO: 195 - DNA, 321 bp, synthetic construct
  source 1..321: mol_type = other DNA
gacatccagatgacccagtctccatcctccctgtctgcatctgtaggagacagagtcaccatcacttgccgggcaagtcagagcattagaaatgttttaggctggtttcagcagaaaccagggaaagcccctcagcgcctgatctatgctgcatccagtttgcaaagtggggtcccatcaaggttcagcggcagtggatctgggacagaattcactctcacaatcagcagcctacagcctgaagattttgcaacttattactgtctacagcataatttttacccgctcactttcggcggagggaccaaggtggagatcaaa

SEQ ID NO: 196 - protein, 107 aa, synthetic construct
DIQMTQSPSSLSASVGDRVTITCRASQSIRNVLGWFQQKPGKAPQRLIYAASSLQSGVPSRFSGSGSGTEFTLTISSLQPEDFATYYCLQHNFYPLTFGGGTKVEIK

SEQ ID NO: 197 - protein, 6 aa, synthetic construct
QSIRNV

SEQ ID NO: 198 - skipped

SEQ ID NO: 199 - protein, 9 aa, synthetic construct
LQHNFYPLT

SEQ ID NO: 200 - DNA, 369 bp, synthetic construct
  source 1..369: mol_type = other DNA
gaagtgcagctggtggagtctgggggaggcttggtacagcctggcaggtccctgagactctcctgtgcagcctctggattcacctttgatgataaagccatgcactgggtccggcaagttccagggaagggcctggaatggatctcaggtattagttggaatagtggtactataggctatgcggactctgtgaagggccgattcatcatctccagagacaacgccaagaactccctgtatctacaaatgaacagtctgagagctgaggacacggccttgtattactgcgcaaaagatggagataccagtggctggtactggtacggtttggacgtctggggccaagggaccacggtcaccgtctcctca

SEQ ID NO: 201 - protein, 123 aa, synthetic construct
EVQLVESGGGLVQPGRSLRLSCAASGFTFDDKAMHWVRQVPGKGLEWISGISWNSGTIGYADSVKGRFIISRDNAKNSLYLQMNSLRAEDTALYYCAKDGDTSGWYWYGLDVWGQGTTVTVSS

SEQ ID NO: 202 - protein, 8 aa, synthetic construct
GFTFDDKA

SEQ ID NO: 203 - protein, 8 aa, synthetic construct
ISWNSGTI

SEQ ID NO: 204 - protein, 16 aa, synthetic construct
AKDGDTSGWYWYGLDV

SEQ ID NO: 205 - DNA, 321 bp, synthetic construct
  source 1..321: mol_type = other DNA
gaaattgtgttgacacagtctcctgccaccctgtctttgtctccaggggaaagagccaccctctcctgcagggccagtcagagtgttagcagctacttagcctggtaccaacagaaacctggccaggctcccaggctcctcatccatgatgtatccaacagggccactggcatcccagccaggttcagtggcagtgggtctgggacagacttcactctcaccatcagcagtctagagcctgaagattttgtagtttattactgtcagcagcgtagcgactggcccatcaccttcggccaagggacacgactggagattaaa

SEQ ID NO: 206 - protein, 107 aa, synthetic construct
EIVLTQSPATLSLSPGERATLSCRASQSVSSYLAWYQQKPGQAPRLLIHDVSNRATGIPARFSGSGSGTDFTLTISSLEPEDFVVYYCQQRSDWPITFGQGTRLEIK

SEQ ID NO: 207 - protein, 6 aa, synthetic construct
QSVSSY

SEQ ID NO: 208 - skipped

SEQ ID NO: 209 - protein, 9 aa, synthetic construct
QQRSDWPIT

SEQ ID NO: 210 - DNA, 360 bp, synthetic construct
  source 1..360: mol_type = other DNA
caggtgcagctggtggagtctgggggaggcgtggtccagcctgggaggtccctgagactctcctgtatagcctctggattcaccttcagtgtctatggcattcactgggtccgccaggctccaggcaaggggctggagtggatggcagtaatatcacatgatggaaatattaaacactatgcagactccgtgaagggccgattcaccatctccagagacaattccaagaacacgctgtatcttcaaattaacagcctgagaactgaggacacggctgtgtattactgtgcgaaagatacctggaactcccttgatacttttgatatctggggccaagggacaatggtcaccgtctcttca

SEQ ID NO: 211 - protein, 120 aa, synthetic construct
QVQLVESGGGVVQPGRSLRLSCIASGFTFSVYGIHWVRQAPGKGLEWMAVISHDGNIKHYADSVKGRFTISRDNSKNTLYLQINSLRTEDTAVYYCAKDTWNSLDTFDIWGQGTMVTVSS

SEQ ID NO: 212 - protein, 8 aa, synthetic construct
GFTFSVYG

SEQ ID NO: 213 - protein, 8 aa, synthetic construct
ISHDGNIK

SEQ ID NO: 214 - protein, 13 aa, synthetic construct
AKDTWNSLDTFDI

SEQ ID NO: 215 - DNA, 321 bp, synthetic construct
  source 1..321: mol_type = other DNA
gacatccagttgacccagtctccatcctccctgtctgcatctgtaggagacagagtcaccatcacttgctgggccagtcagggcattagcagttatttagcctggtatcagcaaaaaccagggaaagcccctaagctcctgatctatgctgcatccactttgcaaagtggggtcccatcaaggttcagcggcagtggatctgggacagaattcactctcacaatcagcagcctgcagcctgaagattttgcaacttattactgtcaacagcttaatagttaccctctcactttcggcggagggaccaaggtggagatcaaa

SEQ ID NO: 216 - protein, 107 aa, synthetic construct
DIQLTQSPSSLSASVGDRVTITCWASQGISSYLAWYQQKPGKAPKLLIYAASTLQSGVPSRFSGSGSGTEFTLTISSLQPEDFATYYCQQLNSYPLTFGGGTKVEIK

SEQ ID NO: 217 - protein, 6 aa, synthetic construct
QGISSY

SEQ ID NO: 218 - skipped

SEQ ID NO: 219 - protein, 9 aa, synthetic construct
QQLNSYPLT

SEQ ID NO: 220 - DNA, 360 bp, synthetic construct
  source 1..360: mol_type = other DNA
caggtcaccttgagggagtctggtcccgcgctggtgaaaccctcacagaccctcacactgacctgcaccttctctggattctcactcaacacttatgggatgtttgtgagctggatccgtcagcctccagggaaggccctagagtggcttgcacacattcattgggatgatgataaatactacagcacatctctgaagaccaggctcaccatctccaaggacacctccaaaaaccaggtggtccttacaatgaccaacatggaccctgtggacacagccacgtattattgtgcacgggggcacaataatttgaactacatcatccactggggccagggaaccctggtcaccgtctcctca

SEQ ID NO: 221 - protein, 120 aa, synthetic construct
QVTLRESGPALVKPSQTLTLTCTFSGFSLNTYGMFVSWIRQPPGKALEWLAHIHWDDDKYYSTSLKTRLTISKDTSKNQVVLTMTNMDPVDTATYYCARGHNNLNYIIHWGQGTLVTVSS

SEQ ID NO: 222 - protein, 10 aa, synthetic construct
GFSLNTYGMF

SEQ ID NO: 223 - protein, 7 aa, synthetic construct
IHWDDDK

SEQ ID NO: 224 - protein, 12 aa, synthetic construct
ARGHNNLNYIIH

SEQ ID NO: 225 - DNA, 321 bp, synthetic construct
  source 1..321: mol_type = other DNA
gccatccagatgacccagtctccatcctccctgtctgcatctgtaggagacagagtcaccatcacttgccgggcaagtcagggcattagaaatgatttaggctggtatcagcagaaaccagggaaagcccctaagctcctgatctatgctgcatccactttacaaagtggggtcccatcaaggttcagcggcagtggatctggcacagatttcactctcaccatcagcagcctgcagcctgaagattttgcaacttattactgtctacaagattacaattacccattcactttcggccctgggaccaaagtggatatcaaa

SEQ ID NO: 226 - protein, 107 aa, synthetic construct
AIQMTQSPSSLSASVGDRVTITCRASQGIRNDLGWYQQKPGKAPKLLIYAASTLQSGVPSRFSGSGSGTDFTLTISSLQPEDFATYYCLQDYNYPFTFGPGTKVDIK

SEQ ID NO: 227 - protein, 6 aa, synthetic construct
QGIRND

SEQ ID NO: 228 - skipped

SEQ ID NO: 229 - protein, 9 aa, synthetic construct
LQDYNYPFT

SEQ ID NO: 230 - DNA, 348 bp, synthetic construct
  source 1..348: mol_type = other DNA
gaggtgcagctggtggagtctgggggaggcttggtacagcctggagggtccctgagactctcctgtgcagtctctggattcatcttcagtagttatgaaatgaactgggtccgccaggctccagggaaggggctggagtgggtttcatacattagtagtagtggtagtaccatattctacgcagactctgtgaagggccgattcaccatctccagagacaacgccaagaactcactgtatctgcaaatgaacagcctgagagccgaggacacggctgtttattactgtgtgtctggagtggtcctttttgatgtctggggccaagggacaatggtcaccgtctcttca

SEQ ID NO: 231 - protein, 116 aa, synthetic construct
EVQLVESGGGLVQPGGSLRLSCAVSGFIFSSYEMNWVRQAPGKGLEWVSYISSSGSTIFYADSVKGRFTISRDNAKNSLYLQMNSLRAEDTAVYYCVSGVVLFDVWGQGTMVTVSS

SEQ ID NO: 232 - protein, 8 aa, synthetic construct
GFIFSSYE

SEQ ID NO: 233 - protein, 8 aa, synthetic construct
ISSSGSTI

SEQ ID NO: 234 - protein, 9 aa, synthetic construct
VSGVVLFDV

SEQ ID NO: 235 - DNA, 321 bp, synthetic construct
  source 1..321: mol_type = other DNA
gaaatagtgatgacgcagtctccagccaccctgtctgtgtctccgggggaaagagccaccctctcctgcagggccagtcagagtgttagcagcaactttgcctggtaccaacagaaacctggccaggctcccaggctcctcatctatagtgcatcctccagggccactggtatcccagtcaggttcagtggcagtgggtctgggacagagttcactctcaccatcagcagcctgcagtctgaagattttgcagtttattactgtcagcagtataatatctggcctcggacgttcggccaagggaccaaggtggaaatcaaa

SEQ ID NO: 236 - protein, 107 aa, synthetic construct
EIVMTQSPATLSVSPGERATLSCRASQSVSSNFAWYQQKPGQAPRLLIYSASSRATGIPVRFSGSGSGTEFTLTISSLQSEDFAVYYCQQYNIWPRTFGQGTKVEIK

SEQ ID NO: 237 - protein, 6 aa, synthetic construct
QSVSSN

SEQ ID NO: 238 - skipped

SEQ ID NO: 239 - protein, 9 aa, synthetic construct
QQYNIWPRT

SEQ ID NO: 240 - DNA, 375 bp, synthetic construct
  source 1..375: mol_type = other DNA
gaggtgcagctggtggagtctgggggaggcttggtccagcctggggggtccctgagactctcctgtgcagcctctggattcacctttagtaactattggatgacctgggtccgccaggctccagggaaggggctggagtgggtggccaacataaaggaagatggaagtgagaaagactatgtggactctgtgaagggccgattcaccatctccagagacaacgccaagaactcactgtatctgcaaatgaacagcctgagaggcgaggacacggctgtgtattactgtgcgagagatggggagcagctcgtcgattactactactactacgttatggacgtctggggccaagggaccacggtcaccgtctcctca

SEQ ID NO: 241 - protein, 125 aa, synthetic construct
EVQLVESGGGLVQPGGSLRLSCAASGFTFSNYWMTWVRQAPGKGLEWVANIKEDGSEKDYVDSVKGRFTISRDNAKNSLYLQMNSLRGEDTAVYYCARDGEQLVDYYYYYVMDVWGQGTTVTVSS

SEQ ID NO: 242 - protein, 8 aa, synthetic construct
GFTFSNYW

SEQ ID NO: 243 - protein, 8 aa, synthetic construct
IKEDGSEK

SEQ ID NO: 244 - protein, 18 aa, synthetic construct
ARDGEQLVDYYYYYVMDV

SEQ ID NO: 245 - DNA, 321 bp, synthetic construct
  source 1..321: mol_type = other DNA
gacatccagatgacccagtctccatcttccgtgtctgcatctgtaggagacagagtcaccatcacttgtcgggcgagtcagggtattagcagctggttagcctggtatcagcagaaaccagggaaagcccctaagctcctgatctatgctgcatccagtttgcaaagtggggtcccatcaaggttcagcggcagtggatctgggacagatttcactctcaccatcagcagcctgcagcctgaagattttgcaacttactattgtcaaaaggctaacagtttcccgtacacttttggccaggggaccaagctggagatcaaa

SEQ ID NO: 246 - protein, 107 aa, synthetic construct
DIQMTQSPSSVSASVGDRVTITCRASQGISSWLAWYQQKPGKAPKLLIYAASSLQSGVPSRFSGSGSGTDFTLTISSLQPEDFATYYCQKANSFPYTFGQGTKLEIK

SEQ ID NO: 247 - protein, 6 aa, synthetic construct
QGISSW

SEQ ID NO: 248 - skipped

SEQ ID NO: 249 - protein, 9 aa, synthetic construct
QKANSFPYT

SEQ ID NO: 250 - DNA, 381 bp, synthetic construct
  source 1..381: mol_type = other DNA
gaagtgcagctggtggagtctgggggaggcttggtacagcctggcaggtccctgagactctcctgtgcagcctctggattcacctttgatgactatgccatgcactgggtccggcaagctccagggaagggcctggagtgggtctcaggtattagttggaatagtggttacataggctatgcggactctgtgaagggccgattcaccatctccagagacaacgccgagaactccctacatctgcaaatgaacagtctgagagctgaggacacggccttgtattactgtgcaagagggggatctactctggttcggggagttaagggaggctactacggtatggacgtctggggccaagggaccacggtcaccgtctcctca

SEQ ID NO: 251 - protein, 127 aa, synthetic construct
EVQLVESGGGLVQPGRSLRLSCAASGFTFDDYAMHWVRQAPGKGLEWVSGISWNSGYIGYADSVKGRFTISRDNAENSLHLQMNSLRAEDTALYYCARGGSTLVRGVKGGYYGMDVWGQGTTVTVSS

SEQ ID NO: 252 - protein, 8 aa, synthetic construct
GFTFDDYA

SEQ ID NO: 253 - protein, 8 aa, synthetic construct
ISWNSGYI

SEQ ID NO: 254 - protein, 20 aa, synthetic construct
ARGGSTLVRGVKGGYYGMDV

SEQ ID NO: 255 - DNA, 321 bp, synthetic construct
  source 1..321: mol_type = other DNA
gacatccagatgacccagtctccatcctccctgtctgcatctgtaggagacagagtcaccatcacttgccgggcaagtcagagcataagtagctatttaaattggtatcagcagaaaccaggtaaagcccctaaggtcctgatctatgctgcatccagtttgcaaagtggggtcccatcaaggttcagtggcagtggatctgggacagatttcactctcaccatcagcagtctgcaacctgaagattttgcaacttactactgtcaacagagttacagtattccgctcactttcggcggagggaccaaggtggagatcaaa

SEQ ID NO: 256 - protein, 107 aa, synthetic construct
DIQMTQSPSSLSASVGDRVTITCRASQSISSYLNWYQQKPGKAPKVLIYAASSLQSGVPSRFSGSGSGTDFTLTISSLQPEDFATYYCQQSYSIPLTFGGGTKVEIK

SEQ ID NO: 257 - protein, 6 aa, synthetic construct
QSISSY

SEQ ID NO: 258 - skipped

SEQ ID NO: 259 - protein, 9 aa, synthetic construct
QQSYSIPLT

SEQ ID NO: 260 - DNA, 351 bp, synthetic construct
  source 1..351: mol_type = other DNA
caggtgcagctggtggagtctgggggaggcgtggtccagcctgggaggtccctgagactctcctgtgcagcgtctggattcaccttcagtagctatggcatgcactgggtccgccaggctccaggcaaggggctggagtgggtggcagttatatggtatgatggaagtaataaatactatgcagactccgtgaagggccgattcaccatctccagagacatttccaagaacacgctgtatctgcaaatgaacagcctgagagccgaggacacggccgtatattactgtgcgggtcaactggatctcttctttgactactggggccagggaaccctggtcaccgtctcctca

SEQ ID NO: 261 - protein, 117 aa, synthetic construct
QVQLVESGGGVVQPGRSLRLSCAASGFTFSSYGMHWVRQAPGKGLEWVAVIWYDGSNKYYADSVKGRFTISRDISKNTLYLQMNSLRAEDTAVYYCAGQLDLFFDYWGQGTLVTVSS

SEQ ID NO: 262 - protein, 8 aa, synthetic construct
GFTFSSYG

SEQ ID NO: 263 - protein, 8 aa, synthetic construct
IWYDGSNK

SEQ ID NO: 264 - protein, 10 aa, synthetic construct
AGQLDLFFDY

SEQ ID NO: 265 - DNA, 321 bp, synthetic construct
  source 1..321: mol_type = other DNA
gacatccagatgacccagtctccatcctccctgtctgcatctgtaggagacagagtcaccatcacttgccgggcaagtcagagcattgacaggtatttaaattggtatcggcagaaaccagggaaagcccctaagctcctgatctatactacatccagtttgcaaagtggggtcccatcaaggttcagtggcagtggatctgggacagatttcactctcaccctcagcagtctgcagcctgaagattttgcaacttactactgtcagcagagttacagtcccccgctcactttcggcggagggaccaaggtggagatcaaa

SEQ ID NO: 266 - protein, 107 aa, synthetic construct
DIQMTQSPSSLSASVGDRVTITCRASQSIDRYLNWYRQKPGKAPKLLIYTTSSLQSGVPSRFSGSGSGTDFTLTLSSLQPEDFATYYCQQSYSPPLTFGGGTKVEIK

SEQ ID NO: 267 - protein, 6 aa, synthetic construct
QSIDRY

SEQ ID NO: 268 - skipped

SEQ ID NO: 269 - protein, 9 aa, synthetic construct
QQSYSPPLT

SEQ ID NO: 270 - DNA, 375 bp, synthetic construct
  source 1..375: mol_type = other DNA
gaggtgcagctggtggagtctgggggaggcttggtccagcctggggggtccctgagactctcctgtacagcctctggattcacctttagtaactattggatgacctgggtccgccaggctccagggaaggggctggagtgggtggccaacataaaggaagatggaagtgagaaagagtatgtggactctgtgaagggccggttcaccatctccagagacaacgccaagaattcactgtatctgcaaatgaacagcctgagaggcgaggacacggctgtatattactgtgcgagagatggggagcagctcgtcgattactattactactacgttatggacgtctggggccaagggaccacggtcaccgtctcctca

SEQ ID NO: 271 - protein, 125 aa, synthetic construct
EVQLVESGGGLVQPGGSLRLSCTASGFTFSNYWMTWVRQAPGKGLEWVANIKEDGSEKEYVDSVKGRFTISRDNAKNSLYLQMNSLRGEDTAVYYCARDGEQLVDYYYYYVMDVWGQGTTVTVSS

SEQ ID NO: 272 - protein, 8 aa, synthetic construct
GFTFSNYW

SEQ ID NO: 273 - protein, 8 aa, synthetic construct
IKEDGSEK

SEQ ID NO: 274 - protein, 18 aa, synthetic construct
ARDGEQLVDYYYYYVMDV

SEQ ID NO: 275 - DNA, 321 bp, synthetic construct
  source 1..321: mol_type = other DNA
gacatccagatgacccagtctccatcttccgtgtctgcatctgttggagacagagtcaccatcacttgtcgggcgagtcagggtattagcagctggttagcctggtatcagcagaaaccagggaaagcccctaagctcctgatctatgctgcatccagtttgcaaagtggggtcccatcaaggttcagcggcagtggatctgggacagatttcactctcaccatcagcagcctgcagcctgaagattttgcaacttactattgtcaaaaggctgacagtctcccgtacgcttttggccaggggaccaagctggagatcaaa

SEQ ID NO: 276 - protein, 107 aa, synthetic construct
DIQMTQSPSSVSASVGDRVTITCRASQGISSWLAWYQQKPGKAPKLLIYAASSLQSGVPSRFSGSGSGTDFTLTISSLQPEDFATYYCQKADSLPYAFGQGTKLEIK

SEQ ID NO: 277 - protein, 6 aa, synthetic construct
QGISSW

SEQ ID NO: 278 - skipped

SEQ ID NO: 279 - protein, 9 aa, synthetic construct
QKADSLPYA

SEQ ID NO: 280 - DNA, 363 bp, synthetic construct
  source 1..363: mol_type = other DNA
gaggtgcagctggtggagtctgggggaggcttggttcagcctggggggtccctgagactctcctgtgcaacctctggattcacctttaccagctatgacatgaagtgggtccgccaggctccagggctgggcctggagtgggtctcagctattagtggtagtggtggtaacacatactacgcagactccgtgaagggccggttcaccatctccagagacaattccaggaacacgctgtatctgcaaatgaacagcctgagagccgaggacacggccgtatattactgtacgaggtcccatgacttcggtgccttcgactactttgactactggggccagggaaccctggtcaccgtctcctca

SEQ ID NO: 281 - protein, 121 aa, synthetic construct
EVQLVESGGGLVQPGGSLRLSCATSGFTFTSYDMKWVRQAPGLGLEWVSAISGSGGNTYYADSVKGRFTISRDNSRNTLYLQMNSLRAEDTAVYYCTRSHDFGAFDYFDYWGQGTLVTVSS

SEQ ID NO: 282 - protein, 8 aa, synthetic construct
GFTFTSYD

SEQ ID NO: 283 - protein, 8 aa, synthetic construct
ISGSGGNT

SEQ ID NO: 284 - protein, 14 aa, synthetic construct
TRSHDFGAFDYFDY

SEQ ID NO: 285 - DNA, 321 bp, synthetic construct
  source 1..321: mol_type = other DNA
gacatccagatgacccagtctccatcctccctgtctgcatctgtgggagacagagtcaccatcacttgccgggcaagtcagggcattagagatcattttggctggtatcagcagaaaccagggaaagcccctaagcgcctgatctatgctgcatccagtttgcacagtggggtcccatcaaggttcagcggcagtggatctgggacagaattcactctcacaatcagcagcttgcagcctgaagattttgcaacctattactgtctacagtatgatacttacccgctcactttcggcggagggaccaaggtggagatcaaa

SEQ ID NO: 286 - protein, 107 aa, synthetic construct
DIQMTQSPSSLSASVGDRVTITCRASQGIRDHFGWYQQKPGKAPKRLIYAASSLHSGVPSRFSGSGSGTEFTLTISSLQPEDFATYYCLQYDTYPLTFGGGTKVEIK

SEQ ID NO: 287 - protein, 6 aa, synthetic construct
QGIRDH

SEQ ID NO: 288 - skipped

SEQ ID NO: 289 - protein, 9 aa, synthetic construct
LQYDTYPLT

SEQ ID NO: 290 - DNA, 366 bp, synthetic construct
  source 1..366: mol_type = other DNA
gaagtgcagctggtggagtctgggggagacttggtacagcctggcaggtccctgagactctcctgtgcagcctctggattcacctttgatgattatgccatgcactgggtccggcaagctccagggaagggcctggagtgggtctcaggtattagttggaatagtgctaccagagtctatgcggactctgtgaagggccgattcaccatctccagagacaacgccaagaatttcctgtatctgcaaatgaacagtctgagatctgaggacacggccttgtatcactgtgcaaaagatatggatatctcgctagggtactacggtttggacgtctggggccaagggaccacggtcaccgtctcctca

SEQ ID NO: 291 - protein, 122 aa, synthetic construct
EVQLVESGGDLVQPGRSLRLSCAASGFTFDDYAMHWVRQAPGKGLEWVSGISWNSATRVYADSVKGRFTISRDNAKNFLYLQMNSLRSEDTALYHCAKDMDISLGYYGLDVWGQGTTVTVSS

SEQ ID NO: 292 - protein, 8 aa, synthetic construct
GFTFDDYA

SEQ ID NO: 293 - protein, 8 aa, synthetic construct
ISWNSATR

SEQ ID NO: 294 - protein, 15 aa, synthetic construct
AKDMDISLGYYGLDV

SEQ ID NO: 295 - DNA, 324 bp, synthetic construct
  source 1..324: mol_type = other DNA
gaaatagtgatgacgcagtctccagccaccctgtctgtgtctccaggggaaagagccaccctctcctgcagggccagtcagactgttagcagcaacttagcctggtatcagcagaaacctggccaggctcccaggctcctcatctatggttcatcctccagggccactggtatcccagccaggttcagtggcagtgggtctgggacagagttcactctcaccatcagcagcctgcagtctgaagattttgcagtttattactgtcagcagtataataactggcctccctacacttttggccaggggaccaagctggagatcaaa

SEQ ID NO: 296 - protein, 108 aa, synthetic construct
EIVMTQSPATLSVSPGERATLSCRASQTVSSNLAWYQQKPGQAPRLLIYGSSSRATGIPARFSGSGSGTEFTLTISSLQSEDFAVYYCQQYNNWPPYTFGQGTKLEIK

SEQ ID NO: 297 - protein, 6 aa, synthetic construct
QTVSSN

SEQ ID NO: 298 - skipped

SEQ ID NO: 299 - protein, 10 aa, synthetic construct
QQYNNWPPYT

SEQ ID NO: 300 - DNA, 372 bp, synthetic construct
  source 1..372: mol_type = other DNA
cagatcaccttgaaggagtctggtcctacgctggtgaaacccacacagaccctcacgctgacctgcaccttctctgggttctcactcagcactagtggagtgggtgtggtctggatccgtcagccccccggaaaggccctggagtggcttgcactcatttattggaatgatcataagcggtacagcccatctctggggagcaggctcaccatcaccaaggacacctccaaaaaccaggtggtccttacaatgaccaacatggaccctgtggacacagccacatattactgtgcacactacagtgggagctattcctactactactatggtttggacgtctggggccaagggaccacggtcaccgtctcctca

SEQ ID NO: 301 - protein, 124 aa, synthetic construct
QITLKESGPTLVKPTQTLTLTCTFSGFSLSTSGVGVVWIRQPPGKALEWLALIYWNDHKRYSPSLGSRLTITKDTSKNQVVLTMTNMDPVDTATYYCAHYSGSYSYYYYGLDVWGQGTTVTVSS

SEQ ID NO: 302 - protein, 10 aa, synthetic construct
GFSLSTSGVG

SEQ ID NO: 303 - protein, 7 aa, synthetic construct
IYWNDHK

SEQ ID NO: 304 - protein, 16 aa, synthetic construct
AHYSGSYSYYYYGLDV

SEQ ID NO: 305 - DNA, 321 bp, synthetic construct
  source 1..321: mol_type = other DNA
gacatccagatgacccagtctccatcttccgtgtctgcatctgtaggagacagagtcaccatcacttgtcgggcgagtcagggtattgccagctggttagcctggtatcagcagaaaccagggaaagcccctgagctcctgatctatgctgcatccagtttgcaaggtggggtcccatcaaggttcagcggcagtggatctgggacagatttcactctcaccatcagcagcctgcagcctgaagattttgcaatttactattgtcaacaggctaactatttcccgtggacgttcggccaagggaccaaggtggaaatcaaa

SEQ ID NO: 306 - protein, 107 aa, synthetic construct
DIQMTQSPSSVSASVGDRVTITCRASQGIASWLAWYQQKPGKAPELLIYAASSLQGGVPSRFSGSGSGTDFTLTISSLQPEDFAIYYCQQANYFPWTFGQGTKVEIK

SEQ ID NO: 307 - protein, 6 aa, synthetic construct
QGIASW

SEQ ID NO: 308 - skipped

SEQ ID NO: 309 - protein, 9 aa, synthetic construct
QQANYFPWT

SEQ ID NO: 310 - DNA, 363 bp, synthetic construct
  source 1..363: mol_type = other DNA
gaggtgcagctgttggagtctgggggagccttggtacagcctggggggtccctgagactctcctgtgcagcctctggattcacctttacctcctatgccatgcactgggtccgccaggctccagggaagggtctggagtgggtctcatctattagaggtagtggtggtggcacatactccgcagactccgtgaagggccggttcaccatctccagagacaattccagggacactctatatctgcaaatgaacagtgtgagagccgaggacacggccgtttattactgtgcgaggtcccatgactacggtgccttcgacttctttgactactggggccagggaaccctggtcaccgtctcctca

SEQ ID NO: 311 - protein, 121 aa, synthetic construct
EVQLLESGGALVQPGGSLRLSCAASGFTFTSYAMHWVRQAPGKGLEWVSSIRGSGGGTYSADSVKGRFTISRDNSRDTLYLQMNSVRAEDTAVYYCARSHDYGAFDFFDYWGQGTLVTVSS

SEQ ID NO: 312 - protein, 8 aa, synthetic construct
GFTFTSYA

SEQ ID NO: 313 - protein, 8 aa, synthetic construct
IRGSGGGT

SEQ ID NO: 314 - protein, 14 aa, synthetic construct
ARSHDYGAFDFFDY

SEQ ID NO: 315 - DNA, 321 bp, synthetic construct
  source 1..321: mol_type = other DNA
gacatccagatgacccagtctccatcctccctgtctgcatctgtaggagacagagtcaccatcacttgccgggcaagtcagggcattagaactgatttaggctggtatcagcagaaaccagggaaagcccctaagcgcctgatctatgctgcatccagtttgcaaagtggggtcccatcaaggttcagcggcagtggatctgggacagaattcactctcacaatcagcagcctgcggcctgaagattttgcaactttttactgtctacagtataatagttacccgctcactttcggcggagggaccaaggtggagatcaaa

SEQ ID NO: 316 - protein, 107 aa, synthetic construct
DIQMTQSPSSLSASVGDRVTITCRASQGIRTDLGWYQQKPGKAPKRLIYAASSLQSGVPSRFSGSGSGTEFTLTISSLRPEDFATFYCLQYNSYPLTFGGGTKVEIK

SEQ ID NO: 317 - protein, 6 aa, synthetic construct
QGIRTD

SEQ ID NO: 318 - skipped

SEQ ID NO: 319 - protein, 9 aa, synthetic construct
LQYNSYPLT

SEQ ID NO: 320 - DNA, 348 bp, synthetic construct
  source 1..348: mol_type = other DNA
caggtgcagctggtggagtctgggggaggcttggtcaagcctggagggtccctgagactctcctgtgcagcctctggattcaccttcagtgactacttcatgagctggatccgccaggctccagggaaggggctggagtgggtttcatacattagtagtactggtagtaccataaattatgcagactctgtgaagggccgattcaccatctccagggacaatgtcaagaattcactgtatctgcaaatgaccagcctgagagtcgaggacacggccgtgtattactgtacgagagataactggaactatgaatactggggccagggaaccctggtcaccgtctcctca

SEQ ID NO: 321 - protein, 116 aa, synthetic construct
QVQLVESGGGLVKPGGSLRLSCAASGFTFSDYFMSWIRQAPGKGLEWVSYISSTGSTINYADSVKGRFTISRDNVKNSLYLQMTSLRVEDTAVYYCTRDNWNYEYWGQGTLVTVSS

SEQ ID NO: 322 - protein, 8 aa, synthetic construct
GFTFSDYF

SEQ ID NO: 323 - protein, 8 aa, synthetic construct
ISSTGSTI

SEQ ID NO: 324 - protein, 9 aa, synthetic construct
TRDNWNYEY

SEQ ID NO: 325 - DNA, 321 bp, synthetic construct
  source 1..321: mol_type = other DNA
gaaatagtgatgacgcagtctccagccaccctgtctgtgtctccaggggaaagagccaccctctcctgcagggccagtcagagtgttagcatcaacttagcctggtaccagcagaaacctggccaggctcccaggctcctcatctttgttgcatccaccagggccactggtatcccagccaggttcagtggcagtgggtctgggacagagttcactctcaccatcagcagcctgcagtctgaagattttgcaacttattactgtcagcagtatgatatctggccgtacacttttggccaggggaccaagctggagatcaaa

SEQ ID NO: 326 - protein, 107 aa, synthetic construct
EIVMTQSPATLSVSPGERATLSCRASQSVSINLAWYQQKPGQAPRLLIFVASTRATGIPARFSGSGSGTEFTLTISSLQSEDFATYYCQQYDIWPYTFGQGTKLEIK

SEQ ID NO: 327 - protein, 6 aa, synthetic construct
QSVSIN

SEQ ID NO: 328 - skipped

SEQ ID NO: 329 - protein, 9 aa, synthetic construct
QQYDIWPYT

SEQ ID NO: 330 - DNA, 369 bp, synthetic construct
  source 1..369: mol_type = other DNA
cagctgcagctgcaggagtcgggcccaggactggtgaagccttcggagaccctgtccctcacctgcactgtgtctggtgaatccatcagcagtaatacttactactggggctggatccgccagcccccagggaaggggctggaatggattgggagtatcgattatagtgggaccaccaattataacccgtccctcaagagtcgagtcaccatatccgtagacacgtccaggaatcacttctccctgaggctgaggtctgtgaccgccgcagacacggctgtgtattactgtgcgagagagtggggaaactacggctactattacggtatggacgtttggggccaagggaccacggtcaccgtctcctca

SEQ ID NO: 331 - protein, 123 aa, synthetic construct
QLQLQESGPGLVKPSETLSLTCTVSGESISSNTYYWGWIRQPPGKGLEWIGSIDYSGTTNYNPSLKSRVTISVDTSRNHFSLRLRSVTAADTAVYYCAREWGNYGYYYGMDVWGQGTTVTVSS

SEQ ID NO: 332 - protein, 10 aa, synthetic construct
GESISSNTYY

SEQ ID NO: 333 - protein, 7 aa, synthetic construct
IDYSGTT

SEQ ID NO: 334 - protein, 15 aa, synthetic construct
AREWGNYGYYYGMDV

SEQ ID NO: 335 - DNA, 321 bp, synthetic construct
  source 1..321: mol_type = other DNA
gacatccagatgacccagtctccatcctccctgtctgcatctgtaggagacagagtcaccatcaattgccgggcaagtcagggcattagaaatgatttaggctggtatcagcagaaaccagggaaagcccctaagcgcctgatctatgctgcatccagtttgcaaagtggggtcccattaaggttcagtggcagtggatctgggacagaattcactctcacaatcaacaacctgcagcctgaagattttgcaacttattactgtctatcgcataatagttacccgtggacgttcggccaagggaccaaggtggaaatcaaa

SEQ ID NO: 336 - protein, 107 aa, synthetic construct
DIQMTQSPSSLSASVGDRVTINCRASQGIRNDLGWYQQKPGKAPKRLIYAASSLQSGVPLRFSGSGSGTEFTLTINNLQPEDFATYYCLSHNSYPWTFGQGTKVEIK

SEQ ID NO: 337 - protein, 6 aa, synthetic construct
QGIRND

SEQ ID NO: 338 - skipped

SEQ ID NO: 339 - protein, 9 aa, synthetic construct
LSHNSYPWT

SEQ ID NO: 340 - DNA, 354 bp, synthetic construct
  source 1..354: mol_type = other DNA
caggtgcagctggtgcagtctggggctgaggtgaagaagcctgggtcctcggtgagggtctcctgcaaggcttctagaggcaccttcagcagctatgctatcagctgggtgcgacaggcccctggacaaggccttgagtggatgggagggatcatccccatctttggtacagcaaactacgcacagaagttcctggccagagtcacgattaccgcggacgaatccacgagcacagcctacatggagctgagcagcctgagatctgaggacacggccgtgtattactgtgcgagagagaaggggtggaactactttgactactggggccagggaaccctggtcaccgtctcctca

SEQ ID NO: 341 - protein, 118 aa, synthetic construct
QVQLVQSGAEVKKPGSSVRVSCKASRGTFSSYAISWVRQAPGQGLEWMGGIIPIFGTANYAQKFLARVTITADESTSTAYMELSSLRSEDTAVYYCAREKGWNYFDYWGQGTLVTVSS

SEQ ID NO: 342 - protein, 8 aa, synthetic construct
RGTFSSYA

SEQ ID NO: 343 - protein, 8 aa, synthetic construct
IIPIFGTA

SEQ ID NO: 344 - protein, 11 aa, synthetic construct
AREKGWNYFDY

SEQ ID NO: 345 - DNA, 321 bp, synthetic construct
  source 1..321: mol_type = other DNA
gacatccagatgacccagtctccaccttccgtgtctgcatctgtaggagacagagtcaccatcacttgtcgggcgagtcagggtattagcagctggttagcctggtatcagcagaaaccagggaaagcccctaaactcctgatctatgctgcatccagtttgcaaagtggggtcccatcaaggttcagcggcagtggatctgggacagatttcactctcaccatcagcagcctgcagcctgaagattttgcaacttactattgtcaacaggctaacagtttccctcggacgttcggccaagggaccaaggtggaaatcaaa

SEQ ID NO: 346 - protein, 107 aa, synthetic construct
DIQMTQSPPSVSASVGDRVTITCRASQGISSWLAWYQQKPGKAPKLLIYAASSLQSGVPSRFSGSGSGTDFTLTISSLQPEDFATYYCQQANSFPRTFGQGTKVEIK

SEQ ID NO: 347 - protein, 6 aa, synthetic construct
QGISSW

SEQ ID NO: 348 - skipped

SEQ ID NO: 349 - protein, 9 aa, synthetic construct
QQANSFPRT

SEQ ID NO: 350 - DNA, 369 bp, synthetic construct
  source 1..369: mol_type = other DNA
caggtgcagctggtggagtctgggggaggcttggtcaagcctggagggtccctgagactctcctgtgcagcctctggattcaccttcagtgactactacatgaactggatccgccaggctccagggaaggggctggagtgggtttcatacattagtagtagtgggactaccatatactacgcagactctgtgaagggccgattcaccatctccagggacaacgccaagaaatcactgtatctggagatgaacagcctcagagccgaggacacggccgtgtactactgtgcgagagaggggtacggtaatgactactattactacggtatagacgtctggggccaagggaccacggtcaccgtctcctca

SEQ ID NO: 351 - protein, 123 aa, synthetic construct
QVQLVESGGGLVKPGGSLRLSCAASGFTFSDYYMNWIRQAPGKGLEWVSYISSSGTTIYYADSVKGRFTISRDNAKKSLYLEMNSLRAEDTAVYYCAREGYGNDYYYYGIDVWGQGTTVTVSS

SEQ ID NO: 352 - protein, 8 aa, synthetic construct
GFTFSDYY

SEQ ID NO: 353 - protein, 8 aa, synthetic construct
ISSSGTTI

SEQ ID NO: 354 - protein, 16 aa, synthetic construct
AREGYGNDYYYYGIDV

SEQ ID NO: 355 - DNA, 336 bp, synthetic construct
  source 1..336: mol_type = other DNA
gatattgtgatgactcagtctccactctccctgcccgtcacccctggagagccggcctccatctcctgcaggtctagtcagagcctcctgcatggtaatggatacaactatttgacttggtacctgcagaagccagggcagtctccacagctcctgatctatttgggttctaatcgggcctccggggtccctgacaggttcagtggcagtggatcaggcacagattttacactgaaaataagcagagtggaggctgaggatgttggggtttattactgcatgcaagctctacaaactccgtacacttttggccaggggaccaagctggagatcaaa

SEQ ID NO: 356 - protein, 112 aa, synthetic construct
DIVMTQSPLSLPVTPGEPASISCRSSQSLLHGNGYNYLTWYLQKPGQSPQLLIYLGSNRASGVPDRFSGSGSGTDFTLKISRVEAEDVGVYYCMQALQTPYTFGQGTKLEIK

SEQ ID NO: 357 - protein, 11 aa, synthetic construct
QSLLHGNGYNY

SEQ ID NO: 358 - skipped

SEQ ID NO: 359 - protein, 9 aa, synthetic construct
MQALQTPYT

SEQ ID NO: 360 - DNA, 366 bp, synthetic construct
  source 1..366: mol_type = other DNA
caggtgcagctggtggagtctgggggaggcgtggtccagcctgggaggtccctgagactctcctgtgcagcctctggattcaccttcagtagctttggcatgcactgggtccgccaggctccaggcaaggggctggagtgggtgatatttatatcatatgatggaagtgataaatactatgcagactccgtgaagggccgattcgccatctccagagacagttccaagaacacgctatatctgcaaatgaacagcctgagagctgaggacacggctgtgtattactgtgcgaaagaaaacggtattttgactgattcctacggtatggacgtctggggccaagggaccacggtcaccgtctcctca

SEQ ID NO: 361 - protein, 122 aa, synthetic construct
QVQLVESGGGVVQPGRSLRLSCAASGFTFSSFGMHWVRQAPGKGLEWVIFISYDGSDKYYADSVKGRFAISRDSSKNTLYLQMNSLRAEDTAVYYCAKENGILTDSYGMDVWGQGTTVTVSS

SEQ ID NO: 362 - protein, 8 aa, synthetic construct
GFTFSSFG

SEQ ID NO: 363 - protein, 8 aa, synthetic construct
ISYDGSDK

SEQ ID NO: 364 - protein, 15 aa, synthetic construct
AKENGILTDSYGMDV

SEQ ID NO: 365 - DNA, 324 bp, synthetic construct
  source 1..324: mol_type = other DNA
gacatccagatgacccagtctccatcctccctgtctgcatctgtaggagacagagtcaccatcacttgccgggcaagtcagagcattagcagctatttaaattggtatcagcagaaaccagggaaagcccctaagctcctgatctatgctgcatccagtttgcaaagtggggtcccgtcaaggttcagtggcagtggatctgggacagatttcactctcaccatcagcagtctgcaacctgaagattttgcaacttactactgtcaacagagttacagtacccctccgatcaccttcggccaagggacacgactggagattaaa

SEQ ID NO: 366 - protein, 108 aa, synthetic construct
DIQMTQSPSSLSASVGDRVTITCRASQSISSYLNWYQQKPGKAPKLLIYAASSLQSGVPSRFSGSGSGTDFTLTISSLQPEDFATYYCQQSYSTPPITFGQGTRLEIK

SEQ ID NO: 367 - protein, 6 aa, synthetic construct
QSISSY

SEQ ID NO: 368 - skipped

SEQ ID NO: 369 - protein, 10 aa, synthetic construct
QQSYSTPPIT

SEQ ID NO: 370 - DNA, 372 bp, synthetic construct
  source 1..372: mol_type = other DNA
caggttcagctggtgcagtctggagctgaggtgaagaagcctggggcctctgtgaaggtctcctgcaaggcttctggttacacctttaccagctatggtatcagctgggtgcgacaggcccctggacaagggcttgagtggatgggatggatcagtgtttaccatggtaacacaaactatgcacagaagttccagggcagagtcaccatgaccacagacacatccacgagcacagcctacatggagctgaggagcctgagatctgacgacacggccgtgtattactgtgcgagagaggggtattacgatttttggagtggttattacccttttgactactggggccagggaaccctggtcaccgtctcctca

SEQ ID NO: 371 - protein, 124 aa, synthetic construct
QVQLVQSGAEVKKPGASVKVSCKASGYTFTSYGISWVRQAPGQGLEWMGWISVYHGNTNYAQKFQGRVTMTTDTSTSTAYMELRSLRSDDTAVYYCAREGYYDFWSGYYPFDYWGQGTLVTVSS

SEQ ID NO: 372 - protein, 8 aa, synthetic construct
GYTFTSYG

SEQ ID NO: 373 - protein, 8 aa, synthetic construct
ISVYHGNT

SEQ ID NO: 374 - protein, 17 aa, synthetic construct
AREGYYDFWSGYYPFDY

SEQ ID NO: 375 - DNA, 324 bp, synthetic construct; identical to SEQ ID NO: 365
  source 1..324: mol_type = other DNA

SEQ ID NO: 376 - protein, 108 aa, synthetic construct; identical to SEQ ID NO: 366

SEQ ID NO: 377 - protein, 6 aa, synthetic construct
QSISSY

SEQ ID NO: 378 - skipped

SEQ ID NO: 379 - protein, 10 aa, synthetic construct
QQSYSTPPIT

SEQ ID NO: 380 - DNA, 354 bp, synthetic construct
  source 1..354: mol_type = other DNA
gaggtgcagctggtggagtctgggggaggcttgatacaacctggagggtccctgagactctcctgtgaagcctctggattcaccttcagaaattatgaaatgaattgggtccgccaggctccagggaaggggctggagtgggtttcatatattagtagtagtggtaatatgaaagactacgcagagtctgtgaagggccgattcaccatctccagagacaatgtcaagaattcactgcagctgcaaatgaacagcctgagagtcgaggacacggctgtttattactgtgcgagagacgagtttccttacggaatggacgtctggggccaagggaccacggtcaccgtctcctca

SEQ ID NO: 381 - protein, 118 aa, synthetic construct
EVQLVESGGGLIQPGGSLRLSCEASGFTFRNYEMNWVRQAPGKGLEWVSYISSSGNMKDYAESVKGRFTISRDNVKNSLQLQMNSLRVEDTAVYYCARDEFPYGMDVWGQGTTVTVSS

SEQ ID NO: 382 - protein, 8 aa, synthetic construct
GFTFRNYE

SEQ ID NO: 383 - protein, 8 aa, synthetic construct
ISSSGNMK

SEQ ID NO: 384 - protein, 11 aa, synthetic construct
ARDEFPYGMDV

SEQ ID NO: 385 - DNA, 324 bp, synthetic construct; identical to SEQ ID NO: 365
  source 1..324: mol_type = other DNA

SEQ ID NO: 386 - protein, 108 aa, synthetic construct; identical to SEQ ID NO: 366

SEQ ID NO: 387 - protein, 6 aa, synthetic construct
QSISSY

SEQ ID NO: 388 - skipped

SEQ ID NO: 389 - protein, 10 aa, synthetic construct
QQSYSTPPIT

SEQ ID NO: 390 - DNA, 363 bp, synthetic construct
  source 1..363: mol_type = other DNA
gaagtgcagctggtggagtctgggggaggcttggttcagcctggcaggtccctgagactctcctgtgcagcctctggattcacctttgatgattatgccatgaactgggtccggcaagctccagggaagggcctggagtgggtctcaggtattagttggagtagtggtagcatggactatgcggactctgtgaagggccgattcaccatctccagagacaacgccaaaaactccctgtatctgcaaatgaacagtctgagaactgaggacacggccttatattactgtgcaaaagctagggaagttggagactactacggtatggacgtctggggccaagggaccacggtcaccgtctcctca

SEQ ID NO: 391 - protein, 121 aa, synthetic construct
EVQLVESGGGLVQPGRSLRLSCAASGFTFDDYAMNWVRQAPGKGLEWVSGISWSSGSMDYADSVKGRFTISRDNAKNSLYLQMNSLRTEDTALYYCAKAREVGDYYGMDVWGQGTTVTVSS

SEQ ID NO: 392 - protein, 8 aa, synthetic construct
GFTFDDYA

SEQ ID NO: 393 - protein, 8 aa, synthetic construct
ISWSSGSM

SEQ ID NO: 394 - protein, 14 aa, synthetic construct
AKAREVGDYYGMDV

SEQ ID NO: 395 - DNA, 324 bp, synthetic construct; identical to SEQ ID NO: 365
  source 1..324: mol_type = other DNA

SEQ ID NO: 396 - protein, 108 aa, synthetic construct; identical to SEQ ID NO: 366

SEQ ID NO: 397 - protein, 6 aa, synthetic construct
QSISSY

SEQ ID NO: 398 - skipped

SEQ ID NO: 399 - protein, 10 aa, synthetic construct
QQSYSTPPIT

SEQ ID NO: 400 - DNA, 357 bp, synthetic construct
  source 1..357: mol_type = other DNA
gaagtgcagctggtggagtctgggggaggcttggtacagcctggcaggtccctgacactctcctgtgcagcctctggattcacctttgataattttggcatgcactgggtccggcaaggtccagggaagggcctggaatgggtctcaggtcttacttggaatagtggtgtcataggctatgcggactctgtgaagggccgattcaccatctccagagacaacgccaagaactccctgtatctgcaaatgaacagtctgagacctgaggacacggccttatattactgtgcaaaagatatacggaattacggcccctttgactactggggccagggaaccctggtcaccgtctcctca

SEQ ID NO: 401 - protein, 119 aa, synthetic construct
EVQLVESGGGLVQPGRSLTLSCAASGFTFDNFGMHWVRQGPGKGLEWVSGLTWNSGVIGYADSVKGRFTISRDNAKNSLYLQMNSLRPEDTALYYCAKDIRNYGPFDYWGQGTLVTVSS

SEQ ID NO: 402 - protein, 8 aa, synthetic construct
GFTFDNFG

SEQ ID NO: 403 - protein, 8 aa, synthetic construct
LTWNSGVI

SEQ ID NO: 404 - protein, 12 aa, synthetic construct
AKDIRNYGPFDY

SEQ ID NO: 405 - DNA, 324 bp, synthetic construct
  source 1..324: mol_type = other DNA
gaaattgtgttgacgcagtctccaggcaccctgtctttgtctccaggggaaagagccaccctctcctgcagggccagtcagagtgttagcagcagctacttagcctggtaccagcagaaacctggccaggctcccaggctcctcatctatggtgcatccagcagggccactggcatcccagacaggttcagtggcagtgggtctgggacagacttcactctcaccatcagcagactggagcctgaagattttgcagtgtattactgtcagcagtatggtagctcaccttggacgttcggccaagggaccaaggtggaaatcaaa

SEQ ID NO: 406 - protein, 108 aa, synthetic construct
EIVLTQSPGTLSLSPGERATLSCRASQSVSSSYLAWYQQKPGQAPRLLIYGASSRATGIPDRFSGSGSGTDFTLTISRLEPEDFAVYYCQQYGSSPWTFGQGTKVEIK

SEQ ID NO: 407 - protein, 7 aa, synthetic construct
QSVSSSY

SEQ ID NO: 408 - skipped

SEQ ID NO: 409 - protein, 9 aa, synthetic construct
QQYGSSPWT

SEQ ID NO: 410 - DNA, 357 bp, synthetic construct
  source 1..357: mol_type = other DNA
gaggtgcagctggtggagtctgggggaggcttagtacagcctggagggtccctaagactctcctgtgcagcctctggattcaccttcaatatttttgaaatgaactgggtccgccaggctccagggaaggggctggagtggatttcctacattagtagtcgtggaactaccacatactacgcagactctgtgaggggccgattcaccatctccagagacaacgccaagaactcactgtatctgcaaatgaacagcctgagagccgaggacacggctgtttattactgtgcgagagattatgaagcaacaatcccttttgacttctggggccagggaaccctggtcaccgtctcctca

SEQ ID NO: 411 - protein, 119 aa, synthetic construct
EVQLVESGGGLVQPGGSLRLSCAASGFTFNIFEMNWVRQAPGKGLEWISYISSRGTTTYYADSVRGRFTISRDNAKNSLYLQMNSLRAEDTAVYYCARDYEATIPFDFWGQGTLVTVSS

SEQ ID NO: 412 - protein, 8 aa, synthetic construct
GFTFNIFE

SEQ ID NO: 413 - protein, 8 aa, synthetic construct
ISSRGTTT

SEQ ID NO: 414 - protein, 12 aa, synthetic construct
ARDYEATIPFDF

SEQ ID NO: 415 - DNA, 324 bp, synthetic construct; identical to SEQ ID NO: 365
  source 1..324: mol_type = other DNA

SEQ ID NO: 416 - protein, 108 aa, synthetic construct; identical to SEQ ID NO: 366

SEQ ID NO: 417 - protein, 6 aa, synthetic construct
QSISSY

SEQ ID NO: 418 - skipped

SEQ ID NO: 419 - protein, 10 aa, synthetic construct
QQSYSTPPIT

SEQ ID NO: 420 - DNA, 363 bp, synthetic construct
  source 1..363: mol_type = other DNA
gaggtgcagctggtggagtctgggggaagtgtggtacggcctggggggtccctgagactctcctgtgaagcctctggattcacctttgatgattatggcatgagctgggtccgccaagatccagggaaggggctggagtgggtctctggtattaattggaatggtgatagaacaaattatgcagactctgtgaagggccgattcatcatttccagagacaacgccaagaactctgtgtatctacaaatgaacagtctgagagcggaggactcggccttgtatcactgtgcgagagatcagggactcggagtggcagctacccttgactactggggccagggaaccctggtcaccgtctcctca

SEQ ID NO: 421 - protein, 121 aa, synthetic construct
EVQLVESGGSVVRPGGSLRLSCEASGFTFDDYGMSWVRQDPGKGLEWVSGINWNGDRTNYADSVKGRFIISRDNAKNSVYLQMNSLRAEDSALYHCARDQGLGVAATLDYWGQGTLVTVSS

SEQ ID NO: 422 - protein, 8 aa, synthetic construct
GFTFDDYG

SEQ ID NO: 423 - protein, 8 aa, synthetic construct
INWNGDRT

SEQ ID NO: 424 - protein, 14 aa, synthetic construct
ARDQGLGVAATLDY

SEQ ID NO: 425 - DNA, 324 bp, synthetic construct; identical to SEQ ID NO: 365
  source 1..324: mol_type = other DNA

SEQ ID NO: 426 - protein, 108 aa, synthetic construct; identical to SEQ ID NO: 366

SEQ ID NO: 427 - protein, 6 aa, synthetic construct
QSISSY

SEQ ID NO: 428 - skipped

SEQ ID NO: 429 - protein, 10 aa, synthetic construct
QQSYSTPPIT

SEQ ID NO: 430 - DNA, 384 bp, synthetic construct
  source 1..384: mol_type = other DNA
gaggtgcagctggtggagtctgggggaggcttggtacagcctggagggtccctgagactctcctgtgcagcctctggattcaccgtcagtaattatgaaatgaactgggtccgccaggctccagggaaggggctggagtgggtttcatacattagtagtagtaccagtaacatatactacgcagactctgtgaagggccgattcaccatctccagagacaacgccgagaactcactgtatctgcagatgaacagcctgagagtcgaggacacggctgtttattactgtgtgagagatgggattgtagtagttccagttggtcgtggatactactattacggtttggacgtctggggccaagggaccacggtcaccgtctcctca

SEQ ID NO: 431 - protein, 128 aa, synthetic construct
EVQLVESGGGLVQPGGSLRLSCAASGFTVSNYEMNWVRQAPGKGLEWVSYISSSTSNIYYADSVKGRFTISRDNAENSLYLQMNSLRVEDTAVYYCVRDGIVVVPVGRGYYYYGLDVWGQGTTVTVSS

SEQ ID NO: 432 - protein, 8 aa, synthetic construct
GFTVSNYE

SEQ ID NO: 433 - protein, 8 aa, synthetic construct
ISSSTSNI

SEQ ID NO: 434 - protein, 21 aa, synthetic construct
VRDGIVVVPVGRGYYYYGLDV

SEQ ID NO: 435 - DNA, 324 bp, synthetic construct; identical to SEQ ID NO: 365
  source 1..324: mol_type = other DNA

SEQ ID NO: 436 - protein, 108 aa, synthetic construct; identical to SEQ ID NO: 366

SEQ ID NO: 437 - protein, 6 aa, synthetic construct
QSISSY

SEQ ID NO: 438 - skipped

SEQ ID NO: 439 - protein, 10 aa, synthetic construct
QQSYSTPPIT

SEQ ID NO: 440 - DNA, 378 bp, synthetic construct
  source 1..378: mol_type = other DNA
caggtgcagctggtggagtctgggggaggcgtggtccagcctggaaggtccctgagactctcctgcgcagcctctggattcccctttagtaattatgtcatgtattgggtccgccaggctccaggcaaggggctggagtgggtggctcttattttttttgacggaaagaaaaactatcatgcagactccgtgaagggccgattcaccataaccagagacaattccaaaaatatgttatatctgcaaatgaacagcctgagacctgaggacgcggctgtgtattactgtgcgaaaatccattgtcctaatggtgtatgttacaaggggtattacggaatggacgtctggggccaagggaccacggtcaccgtctcctca

SEQ ID NO: 441 - protein, 126 aa, synthetic construct
QVQLVESGGGVVQPGRSLRLSCAASGFPFSNYVMYWVRQAPGKGLEWVALIFFDGKKNYHADSVKGRFTITRDNSKNMLYLQMNSLRPEDAAVYYCAKIHCPNGVCYKGYYGMDVWGQGTTVTVSS

SEQ ID NO: 442 - protein, 8 aa, synthetic construct
GFPFSNYV

SEQ ID NO: 443 - protein, 8 aa, synthetic construct
IFFDGKKN

SEQ ID NO: 444 - protein, 19 aa, synthetic construct
AKIHCPNGVCYKGYYGMDV

SEQ ID NO: 445 - DNA, 324 bp, synthetic construct; identical to SEQ ID NO: 365
  source 1..324: mol_type = other DNA

SEQ ID NO: 446 - protein, 108 aa, synthetic construct; identical to SEQ ID NO: 366

SEQ ID NO: 447 - protein, 6 aa, synthetic construct
QSISSY

SEQ ID NO: 448 - skipped

SEQ ID NO: 449 - protein, 10 aa, synthetic construct
QQSYSTPPIT

SEQ ID NO: 450 - DNA, 375 bp, synthetic construct
  source 1..375: mol_type = other DNA
gaggtgcagctggtggagtctgggggaggcttggtccagcctggggggtccctaagactctcctgtgcagcctctggattcacctttagtaactattggatgaactgggtccgccaggctccagggaagggactggagtgggtggccaatataaaagaagatggaggtaagaaattgtatgtggactctgtgaagggccgattcaccatctccagagacaacgccaagaactcactgtttctgcaaatgaacagcctgagagccgaggacacggctgtgtattattgtgcgagagaagatacaactttggttgtggactactactactacggtatggacgtctggggccaagggaccacggtcaccgtctcctca

SEQ ID NO: 451 - protein, 125 aa, synthetic construct
EVQLVESGGGLVQPGGSLRLSCAASGFTFSNYWMNWVRQAPGKGLEWVANIKEDGGKKLYVDSVKGRFTISRDNAKNSLFLQMNSLRAEDTAVYYCAREDTTLVVDYYYYGMDVWGQGTTVTVSS

SEQ ID NO: 452 - protein, 8 aa, synthetic construct
GFTFSNYW

SEQ ID NO: 453 - protein, 8 aa, synthetic construct
IKEDGGKK

SEQ ID NO: 454 - protein, 18 aa, synthetic construct
AREDTTLVVDYYYYGMDV

SEQ ID NO: 455 - DNA, 324 bp, synthetic construct; identical to SEQ ID NO: 365
  source 1..324: mol_type = other DNA

SEQ ID NO: 456 - protein, 108 aa, synthetic construct; identical to SEQ ID NO: 366

SEQ ID NO: 457 - protein, 6 aa, synthetic construct
QSISSY

SEQ ID NO: 458 - skipped

SEQ ID NO: 459 - protein, 10 aa, synthetic construct
QQSYSTPPIT

SEQ ID NO: 460 - DNA, 366 bp, synthetic construct
  source 1..366: mol_type = other DNA
caggtccagctggtgcagtctggggctgaggtgaagaagcctgggtcctcggtgaaggtctcctgcaaggcttctggaggcaccttcaacacctatgctatcacctgggtgcgacaggcccctggacaagggcttgaatggatggggggaatcatccctatctctggcatagcagagtacgcacagaagttccagggcagagtcacgatcaccacggatgactcctcgaccacagcctacatggaactgaacagtctgagatctgaggacacggccgtgtattactgtgcgagctggaactacgcactctactacttctacggtatggacgtctggggccgagggaccacggtcaccgtctcctca

SEQ ID NO: 461 - protein, 122 aa, synthetic construct
QVQLVQSGAEVKKPGSSVKVSCKASGGTFNTYAITWVRQAPGQGLEWMGGIIPISGIAEYAQKFQGRVTITTDDSSTTAYMELNSLRSEDTAVYYCASWNYALYYFYGMDVWGRGTTVTVSS

SEQ ID NO: 462 - protein, 8 aa, synthetic construct
GGTFNTYA

SEQ ID NO: 463 - protein, 8 aa, synthetic construct
IIPISGIA

SEQ ID NO: 464 - protein, 15 aa, synthetic construct
ASWNYALYYFYGMDV

SEQ ID NO: 465 - DNA, 324 bp, synthetic construct; identical to SEQ ID NO: 405
  source 1..324: mol_type = other DNA

SEQ ID NO: 466 - protein, 108 aa, synthetic construct; identical to SEQ ID NO: 406

SEQ ID NO: 467 - protein, 7 aa, synthetic construct
QSVSSSY

SEQ ID NO: 468 - skipped

SEQ ID NO: 469 - protein, 9 aa, synthetic construct
QQYGSSPWT

SEQ ID NO: 470 - DNA, 369 bp, synthetic construct
  source 1..369: mol_type = other DNA
caggtgcagctggtggagtctgggggaggcttggtcaagcctggagggtccctgagactctcctgtgcagcctctggattcaccttcagtgtctattacatgaactggatccgccaggctccagggaagggcctggagtgggtttcatacattagtagtagtggtagtaccatatactacgcagactctgtgaagggccgattcaccatctccagggacaacgccaagaactcactgtatctccaaatgaacagtctgagagccgaggacacggccgtatattactgtgggagagaagggtatagtgggacttattcttattacggtatggacgtctggggccaagggaccacggtcaccgtctcctca

SEQ ID NO: 471 - protein, 123 aa, synthetic construct
QVQLVESGGGLVKPGGSLRLSCAASGFTFSVYYMNWIRQAPGKGLEWVSYISSSGSTIYYADSVKGRFTISRDNAKNSLYLQMNSLRAEDTAVYYCGREGYSGTYSYYGMDVWGQGTTVTVSS

SEQ ID NO: 472 - protein, 8 aa, synthetic construct
GFTFSVYY

SEQ ID NO: 473 - protein, 8 aa, synthetic construct
ISSSGSTI

SEQ ID NO: 474 - protein, 16 aa, synthetic construct
GREGYSGTYSYYGMDV

SEQ ID NO: 475 - DNA, 336 bp, synthetic construct
  source 1..336: mol_type = other DNA
gatattgtgatgactcagtctccactctccctgcccgtcacccctggagagccggcctccatctcctgcaggtctagtcagagcctcctgcatagtaatggatacaactatttggattggtacctgcagaagccagggcagtctccacagttcctgatctatttgggttctaatcgggcctccggggtccctgacaggttcagtggcagtggatcaggcacagattttacactgaaaatcaacagagtggaggctgaggatgttggggtttattactgcatgcaagctctacaaactccgtacacttttggccaggggaccaagctggagatcaaa

SEQ ID NO: 476 - protein, 112 aa, synthetic construct
DIVMTQSPLSLPVTPGEPASISCRSSQSLLHSNGYNYLDWYLQKPGQSPQFLIYLGSNRASGVPDRFSGSGSGTDFTLKINRVEAEDVGVYYCMQALQTPYTFGQGTKLEIK

SEQ ID NO: 477 - protein, 11 aa, synthetic construct
QSLLHSNGYNY

SEQ ID NO: 478 - skipped

SEQ ID NO: 479 - protein, 9 aa, synthetic construct
MQALQTPYT

SEQ ID NO: 480 - DNA, 366 bp, synthetic construct
  source 1..366: mol_type = other DNA
gaagtgcagctggtggagtctgggggagggttggtacagcctggcaggtccctgagactctcctgtgcagtctctggattcacctttgatgattatgccatgcactgggtccggcaagctccagggaagggcctggagtgggtctcaggtattagttggaatagtggtaccagaggatatgcggactctgtgaagggccgattcaccatctccagagacaacgccaagaactccctgtatctgcaaatgaacagtctgagaggtgaggacacggccttgtattactgtgtaaaagatattacgatatcccccaactactacggtatggacgtctggggccaagggaccacggtcaccgtctcctca

SEQ ID NO: 481 - protein, 122 aa, synthetic construct
EVQLVESGGGLVQPGRSLRLSCAVSGFTFDDYAMHWVRQAPGKGLEWVSGISWNSGTRGYADSVKGRFTISRDNAKNSLYLQMNSLRGEDTALYYCVKDITISPNYYGMDVWGQGTTVTVSS

SEQ ID NO: 482 - protein, 8 aa, synthetic construct
GFTFDDYA

SEQ ID NO: 483 - protein, 8 aa, synthetic construct
ISWNSGTR

SEQ ID NO: 484 - protein, 15 aa, synthetic construct
VKDITISPNYYGMDV

SEQ ID NO: 485 - DNA, 321 bp, synthetic construct
  source 1..321: mol_type = other DNA
gacatccagatgacccagtctccatcctccctgtctgcatctgtaggagacagagtcaccatcacttgccgggcgagtcaggacattagccattattcagcctggtatcagcagaaaccagggaaacttcctaacctcctgatctatgctgcatccactttgcaatcaggggtcccatctcggttcagtggcagtggatctgggacagatttctctctcaccaccagcagcctgcagcctgaagatgttgcaacttattactgtcaaaagtataacagtgtccctctcactttcggcggagggaccaaggtggagatcaaa

SEQ ID NO: 486 - protein, 107 aa, synthetic construct
DIQMTQSPSSLSASVGDRVTITCRASQDISHYSAWYQQKPGKLPNLLIYAASTLQSGVPSRFSGSGSGTDFSLTTSSLQPEDVATYYCQKYNSVPLTFGGGTKVEIK

SEQ ID NO: 487 - protein, 6 aa, synthetic construct
QDISHY

SEQ ID NO: 488 - skipped

SEQ ID NO: 489 - protein, 9 aa, synthetic construct
QKYNSVPLT

SEQ ID NO: 490 - protein, 118 aa, synthetic construct
EVQLVESGGGLVQPGNSLTLSCVASGFTFSNYGMHWIRQAPKKGLEWIAMIYYDSSKMNYADTVKGRFTISRDNSKNTLYLEMNSLRSEDTAMYYCAVPTSHYVVDVWGQGVSVTVSS

SEQ ID NO: 491 - protein, 107 aa, synthetic construct
DIQMTQSPASLSASLEEIVTITCQASQDIGNWLAWYQQKPGKSPQLLIYGATSLADGVPSRFSGSRSGTQFSLKISRVQVEDIGIYYCLQAYNTPWTFGGGTKLELK

SEQ ID NO: 492 - protein, 243 aa, synthetic construct
DIQMTQSPSSLSASVGDRVTITCRASQGIRDHFGWYQQKPGKAPKRLIYAASSLHSGVPSRFSGSGSGTEFTLTISSLQPEDFATYYCLQYDTYPLTFGGGTKVEIKGGGGSGGGGSGGGGSEVQLVESGGGLVQPGGSLRLSCATSGFTFTSYDMKWVRQAPGLGLEWVSAISGSGGNTYYADSVKGRFTISRDNSRNTLYLQMNSLRAEDTAVYYCTRSHDFGAFDYFDYWGQGTLVTVSS

SEQ ID NO: 493 - protein, 245 aa, synthetic construct
EIVMTQSPATLSVSPGERATLSCRASQTVSSNLAWYQQKPGQAPRLLIYGSSSRATGIPARFSGSGSGTEFTLTISSLQSEDFAVYYCQQYNNWPPYTFGQGTKLEIKGGGGSGGGGSGGGGSEVQLVESGGDLVQPGRSLRLSCAASGFTFDDYAMHWVRQAPGKGLEWVSGISWNSATRVYADSVKGRFTISRDNAKNFLYLQMNSLRSEDTALYHCAKDMDISLGYYGLDVWGQGTTVTVSS

SEQ ID NO: 494 - protein, 246 aa, synthetic construct
DIQMTQSPSSVSASVGDRVTITCRASQGIASWLAWYQQKPGKAPELLIYAASSLQGGVPSRFSGSGSGTDFTLTISSLQPEDFAIYYCQQANYFPWTFGQGTKVEIKGGGGSGGGGSGGGGSQITLKESGPTLVKPTQTLTLTCTFSGFSLSTSGVGVVWIRQPPGKALEWLALIYWNDHKRYSPSLGSRLTITKDTSKNQVVLTMTNMDPVDTATYYCAHYSGSYSYYYYGLDVWGQGTTVTVSS

SEQ ID NO: 495 - protein, 243 aa, synthetic construct
DIQMTQSPSSLSASVGDRVTITCRASQGIRTDLGWYQQKPGKAPKRLIYAASSLQSGVPSRFSGSGSGTEFTLTISSLRPEDFATFYCLQYNSYPLTFGGGTKVEIKGGGGSGGGGSGGGGSEVQLLESGGALVQPGGSLRLSCAASGFTFTSYAMHWVRQAPGKGLEWVSSIRGSGGGTYSADSVKGRFTISRDNSRDTLYLQMNSVRAEDTAVYYCARSHDYGAFDFFDYWGQGTLVTVSS

SEQ ID NO: 496 - protein, 238 aa, synthetic construct
EIVMTQSPATLSVSPGERATLSCRASQSVSINLAWYQQKPGQAPRLLIFVASTRATGIPARFSGSGSGTEFTLTISSLQSEDFATYYCQQYDIWPYTFGQGTKLEIKGGGGSGGGGSGGGGSQVQLVESGGGLVKPGGSLRLSCAASGFTFSDYFMSWIRQAPGKGLEWVSYISSTGSTINYADSVKGRFTISRDNVKNSLYLQMTSLRVEDTAVYYCTRDNWNYEYWGQGTLVTVSS

SEQ ID NO: 497 - protein, 245 aa, synthetic construct
DIQMTQSPSSLSASVGDRVTINCRASQGIRNDLGWYQQKPGKAPKRLIYAASSLQSGVPLRFSGSGSGTEFTLTINNLQPEDFATYYCLSHNSYPWTFGQGTKVEIKGGGGSGGGGSGGGGSQLQLQESGPGLVKPSETLSLTCTVSGESISSNTYYWGWIRQPPGKGLEWIGSIDYSGTTNYNPSLKSRVTISVDTSRNHFSLRLRSVTAADTAVYYCAREWGNYGYYYGMDVWGQGTTVTVSS

SEQ ID NO: 498 - protein, 240 aa, synthetic construct
DIQMTQSPPSVSASVGDRVTITCRASQGISSWLAWYQQKPGKAPKLLIYAASSLQSGVPSRFSGSGSGTDFTLTISSLQPEDFATYYCQQANSFPRTFGQGTKVEIKGGGGSGGGGSGGGGSQVQLVQSGAEVKKPGSSVRVSCKASRGTFSSYAISWVRQAPGQGLEWMGGIIPIFGTANYAQKFLARVTITADESTSTAYMELSSLRSEDTAVYYCAREKGWNYFDYWGQGTLVTVSS

SEQ ID NO: 499 - protein, 250 aa, synthetic construct
DIVMTQSPLSLPVTPGEPASISCRSSQSLLHGNGYNYLTWYLQKPGQSPQLLIYLGSNRASGVPDRFSGSGSGTDFTLKISRVEAEDVGVYYCMQALQTPYTFGQGTKLEIKGGGGSGGGGSGGGGSQVQLVESGGGLVKPGGSLRLSCAASGFTFSDYYMNWIRQAPGKGLEWVSYISSSGTTIYYADSVKGRFTISRDNAKKSLYLEMNSLRAEDTAVYYCAREGYGNDYYYYGIDVWGQGTTVTVSS

SEQ ID NO: 500 - protein, 245 aa, synthetic construct
DIQMTQSPSSLSASVGDRVTITCRASQSISSYLNWYQQKPGKAPKLLIYAASSLQSGVPSRFSGSGSGTDFTLTISSLQPEDFATYYCQQSYSTPPITFGQGTRLEIKGGGGSGGGGSGGGGSQVQLVESGGGVVQPGRSLRLSCAASGFTFSSFGMHWVRQAPGKGLEWVIFISYDGSDKYYADSVKGRFAISRDSSKNTLYLQMNSLRAEDTAVYYCAKENGILTDSYGMDVWGQGTTVTVSS

SEQ ID NO: 501 - protein, 247 aa, synthetic construct
DIQMTQSPSSLSASVGDRVTITCRASQSISSYLNWYQQKPGKAPKLLIYAASSLQSGVPSRFSGSGSGTDFTLTISSLQPEDFATYYCQQSYSTPPITFGQGTRLEIKGGGGSGGGGSGGGGSQVQLVQSGAEVKKPGASVKVSCKASGYTFTSYGISWVRQAPGQGLEWMGWISVYHGNTNYAQKFQGRVTMTTDTSTSTAYMELRSLRSDDTAVYYCAREGYYDFWSGYYPFDYWGQGTLVTVSS

SEQ ID NO: 502 - protein, 241 aa, synthetic construct
DIQMTQSPSSLSASVGDRVTITCRASQSISSYLNWYQQKPGKAPKLLIYAASSLQSGVPSRFSGSGSGTDFTLTISSLQPEDFATYYCQQSYSTPPITFGQGTRLEIKGGGGSGGGGSGGGGSEVQLVESGGGLIQPGGSLRLSCEASGFTFRNYEMNWVRQAPGKGLEWVSYISSSGNMKDYAESVKGRFTISRDNVKNSLQLQMNSLRVEDTAVYYCARDEFPYGMDVWGQGTTVTVSS

SEQ ID NO: 503 - protein, 249 aa, synthetic construct
DIQMTQSPSSLSASVGDRVTITCRASQSISSYLNWYQQKPGKAPKLLIYAASSLQSGVPSRFSGSGSGTDFTLTISSLQPEDFATYYCQQSYSTPPITFGQGTRLEIKGGGGSGGGGSGGGGSQVQLVESGGGVVQPGRSLRLSCAASGFPFSNYVMYWVRQAPGKGLEWVALIFFDGKKNYHADSVKGRFTITRDNSKNMLYLQMNSLRPEDAAVYYCAKIHCPNGVCYKGYYGMDVWGQGTTVTVSS

SEQ ID NO: 504 - protein, 248 aa, synthetic construct
DIQMTQSPSSLSASVGDRVTITCRASQSISSYLNWYQQKPGKAPKLLIYAASSLQSGVPSRFSGSGSGTDFTLTISSLQPEDFATYYCQQSYSTPPITFGQGTRLEIKGGGGSGGGGSGGGGSEVQLVESGGGLVQPGGSLRLSCAASGFTFSNYWMNWVRQAPGKGLEWVANIKEDGGKKLYVDSVKGRFTISRDNAKNSLFLQMNSLRAEDTAVYYCAREDTTLVVDYYYYGMDVWGQGTTVTVSS

SEQ ID NO: 505 - protein, 242 aa, synthetic construct
DIQMTQSPSSLSASVGDRVTITCRASQSISSYLNWYQQKPGKAPKLLIYAASSLQSGVPSRFSGSGSGTDFTLTISSLQPEDFATYYCQQSYSTPPITFGQGTRLEIKGGGGSGGGGSGGGGSEVQLVESGGGLVQPGGSLRLSCAASGFTFNIFEMNWVRQAPGKGLEWISYISSRGTTTYYADSVRGRFTISRDNAKNSLYLQMNSLRAEDTAVYYCARDYEATIPFDFWGQGTLVTVSS

SEQ ID NO: 506 - protein, 244 aa, synthetic construct
DIQMTQSPSSLSASVGDRVTITCRASQSISSYLNWYQQKPGKAPKLLIYAASSLQSGVPSRFSGSGSGTDFTLTISSLQPEDFATYYCQQSYSTPPITFGQGTRLEIKGGGGSGGGGSGGGGSEVQLVESGGSVVRPGGSLRLSCEASGFTFDDYGMSWVRQDPGKGLEWVSGINWNGDRTNYADSVKGRFIISRDNAKNSVYLQMNSLRAEDSALYHCARDQGLGVAATLDYWGQGTLVTVSS

SEQ ID NO: 507 - protein, 251 aa, synthetic construct
DIQMTQSPSSLSASVGDRVTITCRASQSISSYLNWYQQKPGKAPKLLIYAASSLQSGVPSRFSGSGSGTDFTLTISSLQPEDFATYYCQQSYSTPPITFGQGTRLEIKGGGGSGGGGSGGGGSEVQLVESGGGLVQPGGSLRLSCAASGFTVSNYEMNWVRQAPGKGLEWVSYISSSTSNIYYADSVKGRFTISRDNAENSLYLQMNSLRVEDTAVYYCVRDGIVVVPVGRGYYYYGLDVWGQGTTVTVSS

SEQ ID NO: 508 - protein, 244 aa, synthetic construct
DIQMTQSPSSLSASVGDRVTITCRASQSISSYLNWYQQKPGKAPKLLIYAASSLQSGVPSRFSGSGSGTDFTLTISSLQPEDFATYYCQQSYSTPPITFGQGTRLEIKGGGGSGGGGSGGGGSEVQLVESGGGLVQPGRSLRLSCAASGFTFDDYAMNWVRQAPGKGLEWVSGISWSSGSMDYADSVKGRFTISRDNAKNSLYLQMNSLRTEDTALYYCAKAREVGDYYGMDVWGQGTTVTVSS

SEQ ID NO: 509 - protein, 242 aa, synthetic construct
EIVLTQSPGTLSLSPGERATLSCRASQSVSSSYLAWYQQKPGQAPRLLIYGASSRATGIPDRFSGSGSGTDFTLTISRLEPEDFAVYYCQQYGSSPWTFGQGTKVEIKGGGGSGGGGSGGGGSEVQLVESGGGLVQPGRSLTLSCAASGFTFDNFGMHWVRQGPGKGLEWVSGLTWNSGVIGYADSVKGRFTISRDNAKNSLYLQMNSLRPEDTALYYCAKDIRNYGPFDYWGQGTLVTVSS

SEQ ID NO: 510 - protein, 245 aa, synthetic construct
EIVLTQSPGTLSLSPGERATLSCRASQSVSSSYLAWYQQKPGQAPRLLIYGASSRATGIPDRFSGSGSGTDFTLTISRLEPEDFAVYYCQQYGSSPWTFGQGTKVEIKGGGGSGGGGSGGGGSQVQLVQSGAEVKKPGSSVKVSCKASGGTFNTYAITWVRQAPGQGLEWMGGIIPISGIAEYAQKFQGRVTITTDDSSTTAYMELNSLRSEDTAVYYCASWNYALYYFYGMDVWGRGTTVTVSS

SEQ ID NO: 511 - protein, 243 aa, synthetic construct
DIQMTQSPSSLSASIGDRVTITCRASQGISNYLAWYQQKPGKVPKLLIYAASTLQSGVPSRFSGSGSGTDFTLTISSLQPEDVATYYCQNHNSVPLTFGGGTKVEIKGGGGSGGGGSGGGGSEVQLVESGGGLVQPGGSLRLSCAASGFTFNSYAMTWVRQAPGKGLEWVSFIGGSTGNTYYAGSVKGRFTISSDNSKKTLYLQMNSLRAEDTAVYYCAKGGAARRMEYFQHWGQGTLVTVSS

SEQ ID NO: 512 - protein, 243 aa, synthetic construct
DIQMTQSPSSLSASVGDRVTITCRASQGISNYLAWYQQKPGKVPNLLIYAASTLQSGVPSRFSGSGSGTDFTLTISSLQPEDVATYYCQKYNSAPLTFGGGTKVEIKGGGGSGGGGSGGGGSEVQLVESGGGLVQPGGSLRLSCAASGFAFSSYAMTWVRQAPGKGLEWVSVISGTGGSTYYADSVKGRFTISRDNSKNTLYLQMNSLRAEDTAVYYCAKGGAARRMEYFQYWGQGTLVTVSS

SEQ ID NO: 513 - protein, 250 aa, synthetic construct
DIVMTQSPLSLPVTPGEPASISCRSSQSLLHSNGYNYLDWYLQKPGQSPQFLIYLGSNRASGVPDRFSGSGSGTDFTLKINRVEAEDVGVYYCMQALQTPYTFGQGTKLEIKGGGGSGGGGSGGGGSQVQLVESGGGLVKPGGSLRLSCAASGFTFSVYYMNWIRQAPGKGLEWVSYISSSGSTIYYADSVKGRFTISRDNAKNSLYLQMNSLRAEDTAVYYCGREGYSGTYSYYGMDVWGQGTTVTVSS

SEQ ID NO: 514 - protein, 244 aa, synthetic construct
DIQMTQSPSSLSASVGDRVTITCRASQDISHYSAWYQQKPGKLPNLLIYAASTLQSGVPSRFSGSGSGTDFSLTTSSLQPEDVATYYCQKYNSVPLTFGGGTKVEIKGGGGSGGGGSGGGGSEVQLVESGGGLVQPGRSLRLSCAVSGFTFDDYAMHWVRQAPGKGLEWVSGISWNSGTRGYADSVKGRFTISRDNAKNSLYLQMNSLRGEDTALYYCVKDITISPNYYGMDVWGQGTTVTVSS

SEQ ID NO: 515 - protein, 239 aa, synthetic construct
DIQMTQSPSSLSASVGDRVTITCRASQSIDRYLNWYRQKPGKAPKLLIYTTSSLQSGVPSRFSGSGSGTDFTLTLSSLQPEDFATYYCQQSYSPPLTFGGGTKVEIKGGGGSGGGGSGGGGSQVQLVESGGGVVQPGRSLRLSCAASGFTFSSYGMHWVRQAPGKGLEWVAVIWYDGSNKYYADSVKGRFTISRDISKNTLYLQMNSLRAEDTAVYYCAGQLDLFFDYWGQGTLVTVSS

SEQ ID NO: 516 - protein, 247 aa, synthetic construct
DIQMTQSPSSVSASVGDRVTITCRASQGISSWLAWYQQKPGKAPKLLIYAASSLQSGVPSRFSGSGSGTDFTLTISSLQPEDFATYYCQKADSLPYAFGQGTKLEIKGGGGSGGGGSGGGGSEVQLVESGGGLVQPGGSLRLSCTASGFTFSNYWMTWVRQAPGKGLEWVANIKEDGSEKEYVDSVKGRFTISRDNAKNSLYLQMNSLRGEDTAVYYCARDGEQLVDYYYYYVMDVWGQGTTVTVSS

SEQ ID NO: 517 - protein, 249 aa, synthetic construct
DIQMTQSPSSLSASVGDRVTITCRASQSISSYLNWYQQKPGKAPKVLIYAASSLQSGVPSRFSGSGSGTDFTLTISSLQPEDFATYYCQQSYSIPLTFGGGTKVEIKGGGGSGGGGSGGGGSEVQLVESGGGLVQPGRSLRLSCAASGFTFDDYAMHWVRQAPGKGLEWVSGISWNSGYIGYADSVKGRFTISRDNAENSLHLQMNSLRAEDTALYYCARGGSTLVRGVKGGYYGMDVWGQGTTVTVSS

SEQ ID NO: 518 - protein, 238 aa, synthetic construct
EIVMTQSPATLSVSPGERATLSCRASQSVSSNFAWYQQKPGQAPRLLIYSASSRATGIPVRFSGSGSGTEFTLTISSLQSEDFAVYYCQQYNIWPRTFGQGTKVEIKGGGGSGGGGSGGGGSEVQLVESGGGLVQPGGSLRLSCAVSGFIFSSYEMNWVRQAPGKGLEWVSYISSSGSTIFYADSVKGRFTISRDNAKNSLYLQMNSLRAEDTAVYYCVSGVVLFDVWGQGTMVTVSS

SEQ ID NO: 519 - protein, 247 aa, synthetic construct
DIQMTQSPSSVSASVGDRVTITCRASQGISSWLAWYQQKPGKAPKLLIYAASSLQSGVPSRFSGSGSGTDFTLTISSLQPEDFATYYCQKANSFPYTFGQGTKLEIKGGGGSGGGGSGGGGSEVQLVESGGGLVQPGGSLRLSCAASGFTFSNYWMTWVRQAPGKGLEWVANIKEDGSEKDYVDSVKGRFTISRDNAKNSLYLQMNSLRGEDTAVYYCARDGEQLVDYYYYYVMDVWGQGTTVTVSS

SEQ ID NO: 520 - protein, 242 aa, synthetic construct
DIQLTQSPSSLSASVGDRVTITCWASQGISSYLAWYQQKPGKAPKLLIYAASTLQSGVPSRFSGSGSGTEFTLTISSLQPEDFATYYCQQLNSYPLTFGGGTKVEIKGGGGSGGGGSGGGGSQVQLVESGGGVVQPGRSLRLSCIASGFTFSVYGIHWVRQAPGKGLEWMAVISHDGNIKHYADSVKGRFTISRDNSKNTLYLQINSLRTEDTAVYYCAKDTWNSLDTFDIWGQGTMVTVSS

SEQ ID NO: 521 - protein, 242 aa, synthetic construct
AIQMTQSPSSLSASVGDRVTITCRASQGIRNDLGWYQQKPGKAPKLLIYAASTLQSGVPSRFSGSGSGTDFTLTISSLQPEDFATYYCLQDYNYPFTFGPGTKVDIKGGGGSGGGGSGGGGSQVTLRESGPALVKPSQTLTLTCTFSGFSLNTYGMFVSWIRQPPGKALEWLAHIHWDDDKYYSTSLKTRLTISKDTSKNQVVLTMTNMDPVDTATYYCARGHNNLNYIIHWGQGTLVTVSS

SEQ ID NO: 522 - protein, 245 aa, synthetic construct
EIVLTQSPATLSLSPGERATLSCRASQSVSSYLAWYQQKPGQAPRLLIHDVSNRATGIPARFSGSGSGTDFTLTISSLEPEDFVVYYCQQRSDWPITFGQGTRLEIKGGGGSGGGGSGGGGSEVQLVESGGGLVQPGRSLRLSCAASGFTFDDKAMHWVRQVPGKGLEWISGISWNSGTIGYADSVKGRFIISRDNAKNSLYLQMNSLRAEDTALYYCAKDGDTSGWYWYGLDVWGQGTTVTVSS

SEQ ID NO: 523 - protein, 244 aa, synthetic construct
DIQMTQSPSSLSASVGDRVTITCRASQSIRNVLGWFQQKPGKAPQRLIYAASSLQSGVPSRFSGSGSGTEFTLTISSLQPEDFATYYCLQHNFYPLTFGGGTKVEIKGGGGSGGGGSGGGGSQVQLVESGGGVVQPGRSLRLSCAASGFTFTTYGMHWVRQAPGKGLEWVAVIWYDGSNKYYGDSVKGRFTISRDNSKNTLYLQMNSLRVDDTAVYYCTRTHGYTRSSDGFDYWGQGTLVTVSS

SEQ ID NO: 524 - DNA, 738 bp, synthetic construct
  source 1..738: mol_type = other DNA
gacatccagatgacacagagcccatcctctgtgtctgcctctgtgggagacagagtgaccatcacctgtagagccagccagggcattgcttcttggctggcctggtatcagcagaagcctggaaaggcccctgagctgctgatctatgctgccagctctctgcaaggtggtgtccccagcagattcagtggcagtggctctggcacagacttcaccctgaccataagcagcctgcagcctgaggactttgccatctactactgccagcaggccaactacttcccctggacatttggccagggcaccaaggtggaaatcaaaggtggtggtggaagtggtggtggtggcagtggtggtggtggaagccagatcaccctgaaagagtctggccccacactggtcaagcccacacagaccctgacactgacctgcaccttctctggcttcagcctgagcaccagtggtgttggagttgtgtggatcagacagcctcctggcaaggccctggaatggctggcactgatctactggaatgaccacaagagatacagccccagcctgggcagcagactgacaatcaccaaggacaccagcaagaaccaggtggtgctgaccatgaccaacatggaccctgtggacacagccacctactattgtgcccactactctggcagctacagctactactactatggcctggatgtgtggggacagggcacaacagtgacagtgtccagt

SEQ ID NO: 525 - DNA, 738 bp, synthetic construct
  source 1..738: mol_type = other DNA
gacatccagatgacccagagcccaagctctgtgtctgcctcagtgggagacagagtgacaatcacctgcagagccagccagggcattgccagctggctggcctggtaccagcagaagcctggcaaagctcctgaactcctgatctatgctgccagcagcctgcagggtggggtgcctagcaggttctctggctcaggctctggcacagacttcaccctgacaatcagcagcctgcagcctgaggactttgctatctactactgccagcaggccaactacttcccctggacctttggccaaggcaccaaggtggagatcaagggaggaggaggctctggtggaggtggctctgggggagggggcagccagatcaccctgaaggagagtggccctacactggttaagcccacccagacactgacactgacctgcaccttctctggcttcagcctgagcaccagtggagtgggagtggtgtggatcagacagccccctggcaaggccctggaatggctggccctgatctactggaatgatcacaagagatacagccctagcctgggctccagactgaccatcaccaaggacaccagcaaaaaccaggtggtgctgaccatgaccaacatggatccagtggacacagccacctactactgtgcccactactctggcagctacagctactactactatggcctggatgtctggggccaaggcaccacagtcacagtgtccagt

SEQ ID NO: 526 - DNA, 738 bp, synthetic construct
  source 1..738: mol_type = other DNA
gatatccagatgacacaaagcccttcctctgtgtctgcttcagtgggagacagagtcacaatcacatgcagagccagccagggcattgccagctggctggcctggtaccagcagaagcctggcaaagccccagaactgctgatctatgctgccagcagcctccagggtggggtgcccagcagattctctggctctggctctggcacagacttcaccctgaccatcagcagcctgcagccagaggactttgccatctactactgccagcaggccaactacttcccctggacctttggccagggcaccaaggtggaaatcaaggggggaggaggctctggaggaggaggcagtggtggaggaggcagccagatcaccctgaaggagtctggccctaccctggtgaagcctacccagaccctgaccctgacctgcaccttctctggcttcagcctgagcacaagtggtgtgggagtggtgtggatcagacaaccccctggcaaggctctggagtggctggccctgatctactggaatgaccacaagagatacagccctagcctgggcagcaggctgaccatcaccaaagataccagcaagaaccaggtggtgctgaccatgaccaacatggaccctgttgacacagccacatactactgtgcccactacagtggcagctacagctactactactatggcctggatgtctggggccagggcaccacagtgacagtgtcctca

SEQ ID NO: 527 - DNA, 726 bp, synthetic construct
  source 1..726: mol_type = other DNA
gacatccagatgacacagagcccctctagcctgtctgcctctgtgggagacagagtgaccatcacctgtagagccagccagagcatcagcagctacctgaactggtatcagcagaagcctggcaaggcccctaaactgctgatctatgctgccagcagcctgcagtctggggtgccctctagattttctggcagtggctctggcacagacttcaccctgaccataagctccctgcagcctgaggactttgccacctactactgtcagcagagctacagcacccctcctatcacctttggccagggcaccagactggaaatcaaaggtggtggtggaagtggtggtggtggcagtggtggtggtggatctgaagtgcagctggtggaaagtggtggtggcctggttcagcctggtggctctctgagactgagctgtgcagcctctggcttcaccttcaacatctttgagatgaactgggtcagacaggccccaggcaaaggcctggaatggatcagctacatcagctccagaggcaccacaacctactatgctgactctgtcagaggcaggttcaccatcagcagagacaatgccaagaacagcctgtacctgcagatgaactccctgagagctgaggacacagcagtgtactactgtgccagggactatgaggctacaatcccctttgacttctggggccagggaaccctggtcacagttagcagt

SEQ ID NO: 528 - DNA, 726 bp, synthetic construct
  source 1..726: mol_type = other DNA
gacatccagatgacccagagccccagcagcctgtctgcctctgtgggtgacagggtgaccattacctgcagagccagccaaagcatcagcagctacctgaactggtaccagcagaagccaggcaaggcccctaagctgctgatctatgctgccagcagcctgcaatctggagtgcctagcagattcagtggctctggctcaggcacagacttcaccctgaccatctccagcctccagcctgaggattttgccacctactactgccagcagagctacagcaccccccctatcacctttggccagggcaccagactggaaatcaagggaggaggaggctctggaggaggaggctctggagggggaggctctgaggtgcagctggtggagtctgggggaggcctggtgcagcctggaggctccctgaggctgagctgtgctgcctcaggcttcaccttcaacatctttgaaatgaactgggtcagacaggcccctggcaaaggcctggaatggatcagctacatcagcagcagaggcacaacaacatactatgctgactctgtgagaggcaggttcacaatcagcagagacaatgccaagaacagcctgtacctgcagatgaacagcctgagagcagaggatacagctgtgtactactgtgccagagactatgaggccaccatcccctttgatttctggggccagggcaccctggttacagtgtccagt

SEQ ID NO: 529 - DNA, 726 bp, synthetic construct
  source 1..726: mol_type = other DNA
gatatccaaatgacccagagccccagctccctgtcagcctctgtgggagacagagtgaccatcacatgcagagccagccagagcatcagcagctacctgaactggtaccagcagaagcctggcaaggcccccaagctgctgatctatgctgccagcagcctgcagtctggagtgccttccagattctctggctcaggcagtggcacagacttcaccctgacaatcagcagcctgcagcctgaagactttgccacctactactgccagcagagctacagcacaccacctatcacctttggccagggcaccagactggagatcaaagggggtgggggctctggggggggaggcagtggaggaggtggctctgaagtccagctggtggagtctggaggaggcctggtgcagcctggaggcagcctgaggctgtcctgtgcagcctctggcttcaccttcaacatctttgagatgaactgggttaggcaggcccctggcaagggcctggaatggatcagctacattagcagcagaggcaccacaacctactatgctgactctgtgaggggcagattcaccatcagcagagataatgccaagaacagcctgtacctgcagatgaacagcctcagagctgaggacacagctgtgtactactgtgccagagattatgaggccaccatcccctttgacttctggggccaaggcaccctggtgacagtgtcttct

SEQ ID NO: 530 - DNA, 732 bp, synthetic construct
  source 1..732: mol_type = other DNA
gacatccagatgacacagagcccctctagcctgtctgcctctgtgggagacagagtgaccatcacctgtagagccagccagagcatcagcagctacctgaactggtatcagcagaagcctggcaaggcccctaaactgctgatctatgctgccagcagcctgcagtctggggtgccctctagattttctggcagtggctctggcacagacttcaccctgaccataagctccctgcagcctgaggactttgccacctactactgtcagcagagctacagcacccctcctatcacctttggccagggcaccagactggaaatcaaaggtggtggtggaagtggtggtggtggcagtggtggtggtggatctgaagtgcagctggtggaaagtggtggtggcctggttcagcctggcagatccctgagactgagctgtgcagcctctggctttacctttgatgactatgccatgaactgggtcagacaggccccaggcaaaggcctggaatgggtgtcaggcatctcttggtcctctggctccatggactatgctgactctgtgaagggcagattcaccatcagcagagacaatgccaagaacagcctgtacctgcagatgaactccctgagaacagaggacacagccctgtactactgtgccaaggccagagaagtgggagactactatggcatggatgtgtggggccagggaaccacagtgacagtcagtagt

SEQ ID NO: 531 - DNA, 732 bp, synthetic construct
  source 1..732: mol_type = other DNA
gatatccagatgacccagagccccagcagcctgtctgccagtgtgggggatagagtgaccatcacctgcagggccagccagagcatcagcagctacctcaactggtaccagcaaaagcctggcaaggcccccaaactgctgatttatgctgccagcagcctgcagtctggggtcccttccagattctctggctctggctctggcacagacttcaccctgaccatcagcagcctgcagccagaggactttgccacatactactgccagcagagctacagcaccccccctatcacctttggccagggcaccaggctggagatcaagggaggtgggggctcaggaggaggtggctctggaggaggaggctcagaggtgcagctggttgagagtggaggaggcctggtgcagcctggcagaagcctgagactgagctgtgctgcctctggcttcacctttgatgactatgccatgaactgggtgagacaggcccctggcaagggcctggaatgggtgtctggcatctcctggagctctggcagcatggactatgctgactctgtgaagggcaggttcaccatcagcagagacaatgccaagaacagcctgtacctgcagatgaacagcctgagaacagaagacacagccctgtactactgtgcaaaagccagagaagtgggagactactatggcatggatgtgtggggccaaggcaccacagtgacagtgagcagt

SEQ ID NO: 532 - DNA, 732 bp, synthetic construct
  source 1..732: mol_type = other DNA
gacatccagatgacccagagccccagctccctgtcagccagtgtgggtgacagagtgaccatcacctgcagagccagccagagcatcagcagctacctgaactggtaccagcagaaacctggcaaagcccccaagctgctgatttatgctgctagcagcctgcagagtggagtgcccagcagattctcaggcagtggctctggcacagacttcaccctgaccatctccagcctgcagccagaagactttgccacctactactgccagcagagctacagcacccctcctatcacctttggccagggcacaagactggagatcaagggaggaggaggctctggaggaggaggctctggagggggaggctctgaggtccaactggttgaatctggagggggcctggtgcaacctggcaggagcctgagactgagctgtgctgcctctggcttcacctttgatgactatgccatgaactgggtgagacaggcccctggcaagggcctggagtgggtgtctggcatcagctggagctctggcagcatggactatgcagattctgtgaagggcaggttcaccatcagcagagataatgccaagaacagcctgtacctgcagatgaacagcctcaggacagaggacacagccctgtactactgtgccaaggccagagaagtgggtgactactatggcatggatgtgtggggccagggcaccacagtgacagtgagctct

SEQ ID NO: 533 - DNA, 738 bp, synthetic construct
  source 1..738: mol_type = other DNA
gacatccagatgacccagtctccatcttccgtgtctgcatctgtaggagacagagtcaccatcacttgtcgggcgagtcagggtattgccagctggttagcctggtatcagcagaaaccagggaaagcccctgagctcctgatctatgctgcatccagtttgcaaggtggggtcccatcaaggttcagcggcagtggatctgggacagatttcactctcaccatcagcagcctgcagcctgaagattttgcaatttactattgtcaacaggctaactatttcccgtggacgttcggccaagggaccaaggtggaaatcaaaggcggcggcggaagcggagggggaggatcaggaggaggcggatcccagatcaccttgaaggagtctggtcctacgctggtgaaacccacacagaccctcacgctgacctgcaccttctctgggttctcactcagcactagtggagtgggtgtggtctggatccgtcagccccccggaaaggccctggagtggcttgcactcatttattggaatgatcataagcggtacagcccatctctggggagcaggctcaccatcaccaaggacacctccaaaaaccaggtggtccttacaatgaccaacatggaccctgtggacacagccacatattactgtgcacactacagtgggagctattcctactactactatggtttggacgtctggggccaagggaccacggtcaccgtctcctca

SEQ ID NO: 534 - DNA, 747 bp, synthetic construct
  source 1..747: mol_type = other DNA
gacatccagatgacccagtctccatcctccctgtctgcatctgtaggagacagagtcaccatcacttgccgggcaagtcagagcattagcagctatttaaattggtatcagcagaaaccagggaaagcccctaagctcctgatctatgctgcatccagtttgcaaagtggggtcccgtcaaggttcagtggcagtggatctgggacagatttcactctcaccatcagcagtctgcaacctgaagattttgcaacttactactgtcaacagagttacagtacccctccgatcaccttcggccaagggacacgactggagattaaaggcggcggcggaagcggagggggaggatcaggaggaggcggatcccaggtgcagctggtggagtctgggggaggcgtggtccagcctggaaggtccctgagactctcctgcgcagcctctggattcccctttagtaattatgtcatgtattgggtccgccaggctccaggcaaggggctggagtgggtggctcttattttttttgacggaaagaaaaactatcatgcagactccgtgaagggccgattcaccataaccagagacaattccaaaaatatgttatatctgcaaatgaacagcctgagacctgaggacgcggctgtgtattactgtgcgaaaatccattgtcctaatggtgtatgttacaaggggtattacggaatggacgtctggggccaagggaccacggtcaccgtctcctca

SEQ ID NO: 535 - DNA, 726 bp, synthetic construct
  source 1..726: mol_type = other DNA
gacatccagatgacccagtctccatcctccctgtctgcatctgtaggagacagagtcaccatcacttgccgggcaagtcagagcattagcagctatttaaattggtatcagcagaaaccagggaaagcccctaagctcctgatctatgctgcatccagtttgcaaagtggggtcccgtcaaggttcagtggcagtggatctgggacagatttcactctcaccatcagcagtctgcaacctgaagattttgcaacttactactgtcaacagagttacagtacccctccgatcaccttcggccaagggacacgactggagattaaaggcggcggcggaagcggagggggaggatcaggaggaggcggatccgaggtgcagctggtggagtctgggggaggcttagtacagcctggagggtccctaagactctcctgtgcagcctctggattcaccttcaatatttttgaaatgaactgggtccgccaggctccagggaaggggctggagtggatttcctacattagtagtcgtggaactaccacatactacgcagactctgtgaggggccgattcaccatctccagagacaacgccaagaactcactgtatctgcaaatgaacagcctgagagccgaggacacggctgtttattactgtgcgagagattatgaagcaacaatcccttttgacttctggggccagggaaccctggtcaccgtctcctca

SEQ ID NO: 536 - DNA, 732 bp, synthetic construct
  source 1..732: mol_type = other DNA
gacatccagatgacccagtctccatcctccctgtctgcatctgtaggagacagagtcaccatcacttgccgggcaagtcagagcattagcagctatttaaattggtatcagcagaaaccagggaaagcccctaagctcctgatctatgctgcatccagtttgcaaagtggggtcccgtcaaggttcagtggcagtggatctgggacagatttcactctcaccatcagcagtctgcaacctgaagattttgcaacttactactgtcaacagagttacagtacccctccgatcaccttcggccaagggacacgactggagattaaaggcggcggcggaagcggagggggaggatcaggaggaggcggatccgaagtgcagctggtggagtctgggggaggcttggttcagcctggcaggtccctgagactctcctgtgcagcctctggattcacctttgatgattatgccatgaactgggtccggcaagctccagggaagggcctggagtgggtctcaggtattagttggagtagtggtagcatggactatgcggactctgtgaagggccgattcaccatctccagagacaacgccaaaaactccctgtatctgcaaatgaacagtctgagaactgaggacacggccttatattactgtgcaaaagctagggaagttggagactactacggtatggacgtctggggccaagggaccacggtcaccgtctcctca

SEQ ID NO: 537 - protein, 5 aa, synthetic construct
GGGGS

SEQ ID NO: 538 - protein, 107 aa, synthetic construct [sequence omitted]

SEQ ID NO: 539 - protein, 107 aa, synthetic construct
ASTKGPSVFPLAPSSKSTSGGTAALGCLVKDYFPEPVTVSWNSGALTSGVHTFPAVLQSSGLYSLSSVVTVPSSSLGTQTYICNVNHKPSNTKVDKKVEPKSCDKTH

SEQ ID NO: 540 - protein, 214 aa, synthetic construct
DIQMTQSPSSLSASVGDRVTITCRASQGISNYLAWYQQKPGKVPNLLIYAASTLQSGVPSRFSGSGSGTDFTLTISSLQPEDVATYYCQKYNSAPLTFGGGTKVEIKRTVAAPSVFIFPPSDEQLKSGTASVVCLLNNFYPREAKVQWKVDNALQSGNSQESVTEQDSKDSTYSLSSTLTLSKADYEKHKVYACEVTHQGLSSPVTKSFNRGEC

SEQ ID NO: 541 - protein, 228 aa, synthetic construct
EVQLVESGGGLVQPGGSLRLSCAASGFAFSSYAMTWVRQAPGKGLEWVSVISGTGGSTYYADSVKGRFTISRDNSKNTLYLQMNSLRAEDTAVYYCAKGGAARRMEYFQYWGQGTLVTVSSASTKGPSVFPLAPSSKSTSGGTAALGCLVKDYFPEPVTVSWNSGALTSGVHTFPAVLQSSGLYSLSSVVTVPSSSLGTQTYICNVNHKPSNTKVDKKVEPKSCDKTH

SEQ ID NO: 542 - protein, 214 aa, synthetic construct
DIQMTQSPSSLSASIGDRVTITCRASQGISNYLAWYQQKPGKVPKLLIYAASTLQSGVPSRFSGSGSGTDFTLTISSLQPEDVATYYCQNHNSVPLTFGGGTKVEIKRTVAAPSVFIFPPSDEQLKSGTASVVCLLNNFYPREAKVQWKVDNALQSGNSQESVTEQDSKDSTYSLSSTLTLSKADYEKHKVYACEVTHQGLSSPVTKSFNRGEC

SEQ ID NO: 543 - protein, 228 aa, synthetic construct
EVQLVESGGGLVQPGGSLRLSCAASGFTFNSYAMTWVRQAPGKGLEWVSFIGGSTGNTYYAGSVKGRFTISSDNSKKTLYLQMNSLRAEDTAVYYCAKGGAARRMEYFQHWGQGTLVTVSSASTKGPSVFPLAPSSKSTSGGTAALGCLVKDYFPEPVTVSWNSGALTSGVHTFPAVLQSSGLYSLSSVVTVPSSSLGTQTYICNVNHKPSNTKVDKKVEPKSCDKTH

SEQ ID NO: 544 - protein, 214 aa, synthetic construct
DIQMTQSPSSLSASVGDRVTITCRASQSIRNVLGWFQQKPGKAPQRLIYAASSLQSGVPSRFSGSGSGTEFTLTISSLQPEDFATYYCLQHNFYPLTFGGGTKVEIKRTVAAPSVFIFPPSDEQLKSGTASVVCLLNNFYPREAKVQWKVDNALQSGNSQESVTEQDSKDSTYSLSSTLTLSKADYEKHKVYACEVTHQGLSSPVTKSFNRGEC

SEQ ID NO: 545 - protein, 229 aa, synthetic construct
QVQLVESGGGVVQPGRSLRLSCAASGFTFTTYGMHWVRQAPGKGLEWVAVIWYDGSNKYYGDSVKGRFTISRDNSKNTLYLQMNSLRVDDTAVYYCTRTHGYTRSSDGFDYWGQGTLVTVSSASTKGPSVFPLAPSSKSTSGGTAALGCLVKDYFPEPVTVSWNSGALTSGVHTFPAVLQSSGLYSLSSVVTVPSSSLGTQTYICNVNHKPSNTKVDKKVEPKSCDKTH

SEQ ID NO: 546 - protein, 214 aa, synthetic construct
EIVLTQSPATLSLSPGERATLSCRASQSVSSYLAWYQQKPGQAPRLLIHDVSNRATGIPARFSGSGSGTDFTLTISSLEPEDFVVYYCQQRSDWPITFGQGTRLEIKRTVAAPSVFIFPPSDEQLKSGTASVVCLLNNFYPREAKVQWKVDNALQSGNSQESVTEQDSKDSTYSLSSTLTLSKADYEKHKVYACEVTHQGLSSPVTKSFNRGEC

SEQ ID NO: 547 - protein, 230 aa, synthetic construct
EVQLVESGGGLVQPGRSLRLSCAASGFTFDDKAMHWVRQVPGKGLEWISGISWNSGTIGYADSVKGRFIISRDNAKNSLYLQMNSLRAEDTALYYCAKDGDTSGWYWYGLDVWGQGTTVTVSSASTKGPSVFPLAPSSKSTSGGTAALGCLVKDYFPEPVTVSWNSGALTSGVHTFPAVLQSSGLYSLSSVVTVPSSSLGTQTYICNVNHKPSNTKVDKKVEPKSCDKTH

SEQ ID NO: 548 - protein, 214 aa, synthetic construct
DIQLTQSPSSLSASVGDRVTITCWASQGISSYLAWYQQKPGKAPKLLIYAASTLQSGVPSRFSGSGSGTEFTLTISSLQPEDFATYYCQQLNSYPLTFGGGTKVEIKRTVAAPSVFIFPPSDEQLKSGTASVVCLLNNFYPREAKVQWKVDNALQSGNSQESVTEQDSKDSTYSLSSTLTLSKADYEKHKVYACEVTHQGLSSPVTKSFNRGEC

SEQ ID NO: 549 - protein, 227 aa, synthetic construct
QVQLVESGGGVVQPGRSLRLSCIASGFTFSVYGIHWVRQAPGKGLEWMAVISHDGNIKHYADSVKGRFTISRDNSKNTLYLQINSLRTEDTAVYYCAKDTWNSLDTFDIWGQGTMVTVSSASTKGPSVFPLAPSSKSTSGGTAALGCLVKDYFPEPVTVSWNSGALTSGVHTFPAVLQSSGLYSLSSVVTVPSSSLGTQTYICNVNHKPSNTKVDKKVEPKSCDKTH

SEQ ID NO: 550 - protein, 214 aa, synthetic construct
AIQMTQSPSSLSASVGDRVTITCRASQGIRNDLGWYQQKPGKAPKLLIYAASTLQSGVPSRFSGSGSGTDFTLTISSLQPEDFATYYCLQDYNYPFTFGPGTKVDIKRTVAAPSVFIFPPSDEQLKSGTASVVCLLNNFYPREAKVQWKVDNALQSGNSQESVTEQDSKDSTYSLSSTLTLSKADYEKHKVYACEVTHQGLSSPVTKSFNRGEC

SEQ ID NO: 551 - protein, 227 aa, synthetic construct
QVTLRESGPALVKPSQTLTLTCTFSGFSLNTYGMFVSWIRQPPGKALEWLAHIHWDDDKYYSTSLKTRLTISKDTSKNQVVLTMTNMDPVDTATYYCARGHNNLNYIIHWGQGTLVTVSSASTKGPSVFPLAPSSKSTSGGTAALGCLVKDYFPEPVTVSWNSGALTSGVHTFPAVLQSSGLYSLSSVVTVPSSSLGTQTYICNVNHKPSNTKVDKKVEPKSCDKTH

SEQ ID NO: 552 - protein, 214 aa, synthetic construct
EIVMTQSPATLSVSPGERATLSCRASQSVSSNFAWYQQKPGQAPRLLIYSASSRATGIPVRFSGSGSGTEFTLTISSLQSEDFAVYYCQQYNIWPRTFGQGTKVEIKRTVAAPSVFIFPPSDEQLKSGTASVVCLLNNFYPREAKVQWKVDNALQSGNSQESVTEQDSKDSTYSLSSTLTLSKADYEKHKVYACEVTHQGLSSPVTKSFNRGEC

SEQ ID NO: 553 - protein, 223 aa, synthetic construct
EVQLVESGGGLVQPGGSLRLSCAVSGFIFSSYEMNWVRQAPGKGLEWVSYISSSGSTIFYADSVKGRFTISRDNAKNSLYLQMNSLRAEDTAVYYCVSGVVLFDVWGQGTMVTVSSASTKGPSVFPLAPSSKSTSGGTAALGCLVKDYFPEPVTVSWNSGALTSGVHTFPAVLQSSGLYSLSSVVTVPSSSLGTQTYICNVNHKPSNTKVDKKVEPKSCDKTH

SEQ ID NO: 554 - protein, 214 aa, synthetic construct
DIQMTQSPSSVSASVGDRVTITCRASQGISSWLAWYQQKPGKAPKLLIYAASSLQSGVPSRFSGSGSGTDFTLTISSLQPEDFATYYCQKANSFPYTFGQGTKLEIKRTVAAPSVFIFPPSDEQLKSGTASVVCLLNNFYPREAKVQWKVDNALQSGNSQESVTEQDSKDSTYSLSSTLTLSKADYEKHKVYACEVTHQGLSSPVTKSFNRGEC

SEQ ID NO: 555 - protein, 232 aa, synthetic construct
EVQLVESGGGLVQPGGSLRLSCAASGFTFSNYWMTWVRQAPGKGLEWVANIKEDGSEKDYVDSVKGRFTISRDNAKNSLYLQMNSLRGEDTAVYYCARDGEQLVDYYYYYVMDVWGQGTTVTVSSASTKGPSVFPLAPSSKSTSGGTAALGCLVKDYFPEPVTVSWNSGALTSGVHTFPAVLQSSGLYSLSSVVTVPSSSLGTQTYICNVNHKPSNTKVDKKVEPKSCDKTH

SEQ ID NO: 556 - protein, 214 aa, synthetic construct
DIQMTQSPSSLSASVGDRVTITCRASQSISSYLNWYQQKPGKAPKVLIYAASSLQSGVPSRFSGSGSGTDFTLTISSLQPEDFATYYCQQSYSIPLTFGGGTKVEIKRTVAAPSVFIFPPSDEQLKSGTASVVCLLNNFYPREAKVQWKVDNALQSGNSQESVTEQDSKDSTYSLSSTLTLSKADYEKHKVYACEVTHQGLSSPVTKSFNRGEC

SEQ ID NO: 557 - protein, 234 aa, synthetic construct
EVQLVESGGGLVQPGRSLRLSCAASGFTFDDYAMHWVRQAPGKGLEWVSGISWNSGYIGYADSVKGRFTISRDNAENSLHLQMNSLRAEDTALYYCARGGSTLVRGVKGGYYGMDVWGQGTTVTVSSASTKGPSVFPLAPSSKSTSGGTAALGCLVKDYFPEPVTVSWNSGALTSGVHTFPAVLQSSGLYSLSSVVTVPSSSLGTQTYICNVNHKPSNTKVDKKVEPKSCDKTH

SEQ ID NO: 558 - protein, 214 aa, synthetic construct
DIQMTQSPSSLSASVGDRVTITCRASQSIDRYLNWYRQKPGKAPKLLIYTTSSLQSGVPSRFSGSGSGTDFTLTLSSLQPEDFATYYCQQSYSPPLTFGGGTKVEIKRTVAAPSVFIFPPSDEQLKSGTASVVCLLNNFYPREAKVQWKVDNALQSGNSQESVTEQDSKDSTYSLSSTLTLSKADYEKHKVYACEVTHQGLSSPVTKSFNRGEC

SEQ ID NO: 559 - protein, 224 aa, synthetic construct
QVQLVESGGGVVQPGRSLRLSCAASGFTFSSYGMHWVRQAPGKGLEWVAVIWYDGSNKYYADSVKGRFTISRDISKNTLYLQMNSLRAEDTAVYYCAGQLDLFFDYWGQGTLVTVSSASTKGPSVFPLAPSSKSTSGGTAALGCLVKDYFPEPVTVSWNSGALTSGVHTFPAVLQSSGLYSLSSVVTVPSSSLGTQTYICNVNHKPSNTKVDKKVEPKSCDKTH

SEQ ID NO: 560 - protein, 214 aa, synthetic construct
DIQMTQSPSSVSASVGDRVTITCRASQGISSWLAWYQQKPGKAPKLLIYAASSLQSGVPSRFSGSGSGTDFTLTISSLQPEDFATYYCQKADSLPYAFGQGTKLEIKRTVAAPSVFIFPPSDEQLKSGTASVVCLLNNFYPREAKVQWKVDNALQSGNSQESVTEQDSKDSTYSLSSTLTLSKADYEKHKVYACEVTHQGLSSPVTKSFNRGEC

SEQ ID NO: 561 - protein, 232 aa, synthetic construct
EVQLVESGGGLVQPGGSLRLSCTASGFTFSNYWMTWVRQAPGKGLEWVANIKEDGSEKEYVDSVKGRFTISRDNAKNSLYLQMNSLRGEDTAVYYCARDGEQLVDYYYYYVMDVWGQGTTVTVSSASTKGPSVFPLAPSSKSTSGGTAALGCLVKDYFPEPVTVSWNSGALTSGVHTFPAVLQSSGLYSLSSVVTVPSSSLGTQTYICNVNHKPSNTKVDKKVEPKSCDKTH

SEQ ID NO: 562 - protein, 214 aa, synthetic construct
DIQMTQSPSSLSASVGDRVTITCRASQGIRDHFGWYQQKPGKAPKRLIYAASSLHSGVPSRFSGSGSGTEFTLTISSLQPEDFATYYCLQYDTYPLTFGGGTKVEIKRTVAAPSVFIFPPSDEQLKSGTASVVCLLNNFYPREAKVQWKVDNALQSGNSQESVTEQDSKDSTYSLSSTLTLSKADYEKHKVYACEVTHQGLSSPVTKSFNRGEC

SEQ ID NO: 563 - protein, 228 aa, synthetic construct
EVQLVESGGGLVQPGGSLRLSCATSGFTFTSYDMKWVRQAPGLGLEWVSAISGSGGNTYYADSVKGRFTISRDNSRNTLYLQMNSLRAEDTAVYYCTRSHDFGAFDYFDYWGQGTLVTVSSASTKGPSVFPLAPSSKSTSGGTAALGCLVKDYFPEPVTVSWNSGALTSGVHTFPAVLQSSGLYSLSSVVTVPSSSLGTQTYICNVNHKPSNTKVDKKVEPKSCDKTH

SEQ ID NO: 564 - protein, 215 aa, synthetic construct
EIVMTQSPATLSVSPGERATLSCRASQTVSSNLAWYQQKPGQAPRLLIYGSSSRATGIPARFSGSGSGTEFTLTISSLQSEDFAVYYCQQYNNWPPYTFGQGTKLEIKRTVAAPSVFIFPPSDEQLKSGTASVVCLLNNFYPREAKVQWKVDNALQSGNSQESVTEQDSKDSTYSLSSTLTLSKADYEKHKVYACEVTHQGLSSPVTKSFNRGEC

SEQ ID NO: 565 - protein, 229 aa, synthetic construct
EVQLVESGGDLVQPGRSLRLSCAASGFTFDDYAMHWVRQAPGKGLEWVSGISWNSATRVYADSVKGRFTISRDNAKNFLYLQMNSLRSEDTALYHCAKDMDISLGYYGLDVWGQGTTVTVSSASTKGPSVFPLAPSSKSTSGGTAALGCLVKDYFPEPVTVSWNSGALTSGVHTFPAVLQSSGLYSLSSVVTVPSSSLGTQTYICNVNHKPSNTKVDKKVEPKSCDKTH

SEQ ID NO: 566 - protein, 214 aa, synthetic construct
DIQMTQSPSSVSASVGDRVTITCRASQGIASWLAWYQQKPGKAPELLIYAASSLQGGVPSRFSGSGSGTDFTLTISSLQPEDFAIYYCQQANYFPWTFGQGTKVEIKRTVAAPSVFIFPPSDEQLKSGTASVVCLLNNFYPREAKVQWKVDNALQSGNSQESVTEQDSKDSTYSLSSTLTLSKADYEKHKVYACEVTHQGLSSPVTKSFNRGEC

SEQ ID NO: 567 - protein, 231 aa, synthetic construct
QITLKESGPTLVKPTQTLTLTCTFSGFSLSTSGVGVVWIRQPPGKALEWLALIYWNDHKRYSPSLGSRLTITKDTSKNQVVLTMTNMDPVDTATYYCAHYSGSYSYYYYGLDVWGQGTTVTVSSASTKGPSVFPLAPSSKSTSGGTAALGCLVKDYFPEPVTVSWNSGALTSGVHTFPAVLQSSGLYSLSSVVTVPSSSLGTQTYICNVNHKPSNTKVDKKVEPKSCDKTH

SEQ ID NO: 568 - protein, 214 aa, synthetic construct
DIQMTQSPSSLSASVGDRVTITCRASQGIRTDLGWYQQKPGKAPKRLIYAASSLQSGVPSRFSGSGSGTEFTLTISSLRPEDFATFYCLQYNSYPLTFGGGTKVEIKRTVAAPSVFIFPPSDEQLKSGTASVVCLLNNFYPREAKVQWKVDNALQSGNSQESVTEQDSKDSTYSLSSTLTLSKADYEKHKVYACEVTHQGLSSPVTKSFNRGEC

SEQ ID NO: 569 - protein, 228 aa, synthetic construct
EVQLLESGGALVQPGGSLRLSCAASGFTFTSYAMHWVRQAPGKGLEWVSSIRGSGGGTYSADSVKGRFTISRDNSRDTLYLQMNSVRAEDTAVYYCARSHDYGAFDFFDYWGQGTLVTVSSASTKGPSVFPLAPSSKSTSGGTAALGCLVKDYFPEPVTVSWNSGALTSGVHTFPAVLQSSGLYSLSSVVTVPSSSLGTQTYICNVNHKPSNTKVDKKVEPKSCDKTH

SEQ ID NO: 570 - protein, 214 aa, synthetic construct
EIVMTQSPATLSVSPGERATLSCRASQSVSINLAWYQQKPGQAPRLLIFVASTRATGIPARFSGSGSGTEFTLTISSLQSEDFATYYCQQYDIWPYTFGQGTKLEIKRTVAAPSVFIFPPSDEQLKSGTASVVCLLNNFYPREAKVQWKVDNALQSGNSQESVTEQDSKDSTYSLSSTLTLSKADYEKHKVYACEVTHQGLSSPVTKSFNRGEC

SEQ ID NO: 571 - protein, 223 aa, synthetic construct
QVQLVESGGGLVKPGGSLRLSCAASGFTFSDYFMSWIRQAPGKGLEWVSYISSTGSTINYADSVKGRFTISRDNVKNSLYLQMTSLRVEDTAVYYCTRDNWNYEYWGQGTLVTVSSASTKGPSVFPLAPSSKSTSGGTAALGCLVKDYFPEPVTVSWNSGALTSGVHTFPAVLQSSGLYSLSSVVTVPSSSLGTQTYICNVNHKPSNTKVDKKVEPKSCDKTH

SEQ ID NO: 572 - protein, 214 aa, synthetic construct
DIQMTQSPSSLSASVGDRVTINCRASQGIRNDLGWYQQKPGKAPKRLIYAASSLQSGVPLRFSGSGSGTEFTLTINNLQPEDFATYYCLSHNSYPWTFGQGTKVEIKRTVAAPSVFIFPPSDEQLKSGTASVVCLLNNFYPREAKVQWKVDNALQSGNSQESVTEQDSKDSTYSLSSTLTLSKADYEKHKVYACEVTHQGLSSPVTKSFNRGEC

SEQ ID NO: 573 - protein, 230 aa, synthetic construct
QLQLQESGPGLVKPSETLSLTCTVSGESISSNTYYWGWIRQPPGKGLEWIGSIDYSGTTNYNPSLKSRVTISVDTSRNHFSLRLRSVTAADTAVYYCAREWGNYGYYYGMDVWGQGTTVTVSSASTKGPSVFPLAPSSKSTSGGTAALGCLVKDYFPEPVTVSWNSGALTSGVHTFPAVLQSSGLYSLSSVVTVPSSSLGTQTYICNVNHKPSNTKVDKKVEPKSCDKTH

SEQ ID NO: 574 - protein, 214 aa, synthetic construct
DIQMTQSPPSVSASVGDRVTITCRASQGISSWLAWYQQKPGKAPKLLIYAASSLQSGVPSRFSGSGSGTDFTLTISSLQPEDFATYYCQQANSFPRTFGQGTKVEIKRTVAAPSVFIFPPSDEQLKSGTASVVCLLNNFYPREAKVQWKVDNALQSGNSQESVTEQDSKDSTYSLSSTLTLSKADYEKHKVYACEVTHQGLSSPVTKSFNRGEC

SEQ ID NO: 575 - protein, 225 aa, synthetic construct
QVQLVQSGAEVKKPGSSVRVSCKASRGTFSSYAISWVRQAPGQGLEWMGGIIPIFGTANYAQKFLARVTITADESTSTAYMELSSLRSEDTAVYYCAREKGWNYFDYWGQGTLVTVSSASTKGPSVFPLAPSSKSTSGGTAALGCLVKDYFPEPVTVSWNSGALTSGVHTFPAVLQSSGLYSLSSVVTVPSSSLGTQTYICNVNHKPSNTKVDKKVEPKSCDKTH

SEQ ID NO: 576 - protein, 219 aa, synthetic construct
DIVMTQSPLSLPVTPGEPASISCRSSQSLLHGNGYNYLTWYLQKPGQSPQLLIYLGSNRASGVPDRFSGSGSGTDFTLKISRVEAEDVGVYYCMQALQTPYTFGQGTKLEIKRTVAAPSVFIFPPSDEQLKSGTASVVCLLNNFYPREAKVQWKVDNALQSGNSQESVTEQDSKDSTYSLSSTLTLSKADYEKHKVYACEVTHQGLSSPVTKSFNRGEC

SEQ ID NO: 577 - protein, 230 aa, synthetic construct
QVQLVESGGGLVKPGGSLRLSCAASGFTFSDYYMNWIRQAPGKGLEWVSYISSSGTTIYYADSVKGRFTISRDNAKKSLYLEMNSLRAEDTAVYYCAREGYGNDYYYYGIDVWGQGTTVTVSSASTKGPSVFPLAPSSKSTSGGTAALGCLVKDYFPEPVTVSWNSGALTSGVHTFPAVLQSSGLYSLSSVVTVPSSSLGTQTYICNVNHKPSNTKVDKKVEPKSCDKTH

SEQ ID NO: 578 - protein, 215 aa, synthetic construct
DIQMTQSPSSLSASVGDRVTITCRASQSISSYLNWYQQKPGKAPKLLIYAASSLQSGVPSRFSGSGSGTDFTLTISSLQPEDFATYYCQQSYSTPPITFGQGTRLEIKRTVAAPSVFIFPPSDEQLKSGTASVVCLLNNFYPREAKVQWKVDNALQSGNSQESVTEQDSKDSTYSLSSTLTLSKADYEKHKVYACEVTHQGLSSPVTKSFNRGEC

SEQ ID NO: 579 - protein, 229 aa, synthetic construct
QVQLVESGGGVVQPGRSLRLSCAASGFTFSSFGMHWVRQAPGKGLEWVIFISYDGSDKYYADSVKGRFAISRDSSKNTLYLQMNSLRAEDTAVYYCAKENGILTDSYGMDVWGQGTTVTVSSASTKGPSVFPLAPSSKSTSGGTAALGCLVKDYFPEPVTVSWNSGALTSGVHTFPAVLQSSGLYSLSSVVTVPSSSLGTQTYICNVNHKPSNTKVDKKVEPKSCDKTH

SEQ ID NO: 580 - protein, 215 aa, synthetic construct; identical to SEQ ID NO: 578

SEQ ID NO: 581 - protein, 231 aa, synthetic construct
QVQLVQSGAEVKKPGASVKVSCKASGYTFTSYGISWVRQAPGQGLEWMGWISVYHGNTNYAQKFQGRVTMTTDTSTSTAYMELRSLRSDDTAVYYCAREGYYDFWSGYYPFDYWGQGTLVTVSSASTKGPSVFPLAPSSKSTSGGTAALGCLVKDYFPEPVTVSWNSGALTSGVHTFPAVLQSSGLYSLSSVVTVPSSSLGTQTYICNVNHKPSNTKVDKKVEPKSCDKTH

SEQ ID NO: 582 - protein, 215 aa, synthetic construct; identical to SEQ ID NO: 578

SEQ ID NO: 583 - protein, 225 aa, synthetic construct
EVQLVESGGGLIQPGGSLRLSCEASGFTFRNYEMNWVRQAPGKGLEWVSYISSSGNMKDYAESVKGRFTISRDNVKNSLQLQMNSLRVEDTAVYYCARDEFPYGMDVWGQGTTVTVSSASTKGPSVFPLAPSSKSTSGGTAALGCLVKDYFPEPVTVSWNSGALTSGVHTFPAVLQSSGLYSLSSVVTVPSSSLGTQTYICNVNHKPSNTKVDKKVEPKSCDKTH

SEQ ID NO: 584 - protein, 215 aa, synthetic construct; identical to SEQ ID NO: 578

SEQ ID NO: 585 - protein, 228 aa, synthetic construct
EVQLVESGGGLVQPGRSLRLSCAASGFTFDDYAMNWVRQAPGKGLEWVSGISWSSGSMDYADSVKGRFTISRDNAKNSLYLQMNSLRTEDTALYYCAKAREVGDYYGMDVWGQGTTVTVSSASTKGPSVFPLAPSSKSTSGGTAALGCLVKDYFPEPVTVSWNSGALTSGVHTFPAVLQSSGLYSLSSVVTVPSSSLGTQTYICNVNHKPSNTKVDKKVEPKSCDKTH

SEQ ID NO: 586 - protein, 215 aa, synthetic construct
EIVLTQSPGTLSLSPGERATLSCRASQSVSSSYLAWYQQKPGQAPRLLIYGASSRATGIPDRFSGSGSGTDFTLTISRLEPEDFAVYYCQQYGSSPWTFGQGTKVEIKRTVAAPSVFIFPPSDEQLKSGTASVVCLLNNFYPREAKVQWKVDNALQSGNSQESVTEQDSKDSTYSLSSTLTLSKADYEKHKVYACEVTHQGLSSPVTKSFNRGEC

SEQ ID NO: 587 - protein, 226 aa, synthetic construct
EVQLVESGGGLVQPGRSLTLSCAASGFTFDNFGMHWVRQGPGKGLEWVSGLTWNSGVIGYADSVKGRFTISRDNAKNSLYLQMNSLRPEDTALYYCAKDIRNYGPFDYWGQGTLVTVSSASTKGPSVFPLAPSSKSTSGGTAALGCLVKDYFPEPVTVSWNSGALTSGVHTFPAVLQSSGLYSLSSVVTVPSSSLGTQTYICNVNHKPSNTKVDKKVEPKSCDKTH

SEQ ID NO: 588 - protein, 215 aa, synthetic construct; identical to SEQ ID NO: 578

SEQ ID NO: 589 - protein, 226 aa, synthetic construct
EVQLVESGGGLVQPGGSLRLSCAASGFTFNIFEMNWVRQAPGKGLEWISYISSRGTTTYYADSVRGRFTISRDNAKNSLYLQMNSLRAEDTAVYYCARDYEATIPFDFWGQGTLVTVSSASTKGPSVFPLAPSSKSTSGGTAALGCLVKDYFPEPVTVSWNSGALTSGVHTFPAVLQSSGLYSLSSVVTVPSSSLGTQTYICNVNHKPSNTKVDKKVEPKSCDKTH

SEQ ID NO: 590 - protein, 215 aa, synthetic construct; identical to SEQ ID NO: 578

SEQ ID NO: 591 - protein, 228 aa, synthetic construct
EVQLVESGGSVVRPGGSLRLSCEASGFTFDDYGMSWVRQDPGKGLEWVSGINWNGDRTNYADSVKGRFIISRDNAKNSVYLQMNSLRAEDSALYHCARDQGLGVAATLDYWGQGTLVTVSSASTKGPSVFPLAPSSKSTSGGTAALGCLVKDYFPEPVTVSWNSGALTSGVHTFPAVLQSSGLYSLSSVVTVPSSSLGTQTYICNVNHKPSNTKVDKKVEPKSCDKTH

SEQ ID NO: 592 - protein, 215 aa, synthetic construct; identical to SEQ ID NO: 578

SEQ ID NO: 593 - protein, 235 aa, synthetic construct
EVQLVESGGGLVQPGGSLRLSCAASGFTVSNYEMNWVRQAPGKGLEWVSYISSSTSNIYYADSVKGRFTISRDNAENSLYLQMNSLRVEDTAVYYCVRDGIVVVPVGRGYYYYGLDVWGQGTTVTVSSASTKGPSVFPLAPSSKSTSGGTAALGCLVKDYFPEPVTVSWNSGALTSGVHTFPAVLQSSGLYSLSSVVTVPSSSLGTQTYICNVNHKPSNTKVDKKVEPKSCDKTH

SEQ ID NO: 594 - protein, 215 aa, synthetic construct; identical to SEQ ID NO: 578

SEQ ID NO: 595 - protein, 233 aa, synthetic construct
QVQLVESGGGVVQPGRSLRLSCAASGFPFSNYVMYWVRQAPGKGLEWVALIFFDGKKNYHADSVKGRFTITRDNSKNMLYLQMNSLRPEDAAVYYCAKIHCPNGVCYKGYYGMDVWGQGTTVTVSSASTKGPSVFPLAPSSKSTSGGTAALGCLVKDYFPEPVTVSWNSGALTSGVHTFPAVLQSSGLYSLSSVVTVPSSSLGTQTYICNVNHKPSNTKVDKKVEPKSCDKTH

SEQ ID NO: 596 - protein, 215 aa, synthetic construct; identical to SEQ ID NO: 578

SEQ ID NO: 597 - protein, 232 aa, synthetic construct
EVQLVESGGGLVQPGGSLRLSCAASGFTFSNYWMNWVRQAPGKGLEWVANIKEDGGKKLYVDSVKGRFTISRDNAKNSLFLQMNSLRAEDTAVYYCAREDTTLVVDYYYYGMDVWGQGTTVTVSSASTKGPSVFPLAPSSKSTSGGTAALGCLVKDYFPEPVTVSWNSGALTSGVHTFPAVLQSSGLYSLSSVVTVPSSSLGTQTYICNVNHKPSNTKVDKKVEPKSCDKTH

SEQ ID NO: 598 - protein, 215 aa, synthetic construct; identical to SEQ ID NO: 586

SEQ ID NO: 599 - protein, 229 aa, synthetic construct
QVQLVQSGAEVKKPGSSVKVSCKASGGTFNTYAITWVRQAPGQGLEWMGGIIPISGIAEYAQKFQGRVTITTDDSSTTAYMELNSLRSEDTAVYYCASWNYALYYFYGMDVWGRGTTVTVSSASTKGPSVFPLAPSSKSTSGGTAALGCLVKDYFPEPVTVSWNSGALTSGVHTFPAVLQSSGLYSLSSVVTVPSSSLGTQTYICNVNHKPSNTKVDKKVEPKSCDKTH

SEQ ID NO: 600 - protein, 219 aa, synthetic construct
DIVMTQSPLSLPVTPGEPASISCRSSQSLLHSNGYNYLDWYLQKPGQSPQFLIYLGSNRASGVPDRFSGSGSGTDFTLKINRVEAEDVGVYYCMQALQTPYTFGQGTKLEIKRTVAAPSVFIFPPSDEQLKSGTASVVCLLNNFYPREAKVQWKVDNALQSGNSQESVTEQDSKDSTYSLSSTLTLSKADYEKHKVYACEVTHQGLSSPVTKSFNRGEC

SEQ ID NO: 601 - protein, 230 aa, synthetic construct
QVQLVESGGGLVKPGGSLRLSCAASGFTFSVYYMNWIRQAPGKGLEWVSYISSSGSTIYYADSVKGRFTISRDNAKNSLYLQMNSLRAEDTAVYYCGREGYSGTYSYYGMDVWGQGTTVTVSSASTKGPSVFPLAPSSKSTSGGTAALGCLVKDYFPEPVTVSWNSGALTSGVHTFPAVLQSSGLYSLSSVVTVPSSSLGTQTYICNVNHKPSNTKVDKKVEPKSCDKTH

SEQ ID NO: 602 - protein, 214 aa, synthetic construct
DIQMTQSPSSLSASVGDRVTITCRASQDISHYSAWYQQKPGKLPNLLIYAASTLQSGVPSRFSGSGSGTDFSLTTSSLQPEDVATYYCQKYNSVPLTFGGGTKVEIKRTVAAPSVFIFPPSDEQLKSGTASVVCLLNNFYPREAKVQWKVDNALQSGNSQESVTEQDSKDSTYSLSSTLTLSKADYEKHKVYACEVTHQGLSSPVTKSFNRGEC

SEQ ID NO: 603 - protein, 229 aa, synthetic construct
EVQLVESGGGLVQPGRSLRLSCAVSGFTFDDYAMHWVRQAPGKGLEWVSGISWNSGTRGYADSVKGRFTISRDNAKNSLYLQMNSLRGEDTALYYCVKDITISPNYYGMDVWGQGTTVTVSSASTKGPSVFPLAPSSKSTSGGTAALGCLVKDYFPEPVTVSWNSGALTSGVHTFPAVLQSSGLYSLSSVVTVPSSSLGTQTYICNVNHKPSNTKVDKKVEPKSCDKTH

SEQ ID NO: 604 - protein, 233 aa, synthetic construct
EVQLVESGGDLVQPGRSLRLSCAASGFTFDDYAMHWVRQAPGKGLEWVSGISWNSATRVYADSVKGRFTISRDNAKNFLYLQMNSLRSEDTALYHCAKDMDISLGYYGLDVWGQGTTVTVSSASTKGPSVFPLAPCSRSTSESTAALGCLVKDYFPEPVTVSWNSGALTSGVHTFPAVLQSSGLYSLSSVVTVPSSSLGTKTYTCNVDHKPSNTKVDKRVESKYGPPLLQGSG

SEQ ID NO: 605 - protein, 235 aa, synthetic construct
QITLKESGPTLVKPTQTLTLTCTFSGFSLSTSGVGVVWIRQPPGKALEWLALIYWNDHKRYSPSLGSRLTITKDTSKNQVVLTMTNMDPVDTATYYCAHYSGSYSYYYYGLDVWGQGTTVTVSSASTKGPSVFPLAPCSRSTSESTAALGCLVKDYFPEPVTVSWNSGALTSGVHTFPAVLQSSGLYSLSSVVTVPSSSLGTKTYTCNVDHKPSNTKVDKRVESKYGPPLLQGSG

SEQ ID NO: 606 - protein, 232 aa, synthetic construct
EVQLVESGGGLVQPGRSLRLSCAASGFTFDDYAMNWVRQAPGKGLEWVSGISWSSGSMDYADSVKGRFTISRDNAKNSLYLQMNSLRTEDTALYYCAKAREVGDYYGMDVWGQGTTVTVSSASTKGPSVFPLAPCSRSTSESTAALGCLVKDYFPEPVTVSWNSGALTSGVHTFPAVLQSSGLYSLSSVVTVPSSSLGTKTYTCNVDHKPSNTKVDKRVESKYGPPLLQGSG

SEQ ID NO: 607 - protein, 230 aa, synthetic construct
EVQLVESGGGLVQPGGSLRLSCAASGFTFNIFEMNWVRQAPGKGLEWISYISSRGTTTYYADSVRGRFTISRDNAKNSLYLQMNSLRAEDTAVYYCARDYEATIPFDFWGQGTLVTVSSASTKGPSVFPLAPCSRSTSESTAALGCLVKDYFPEPVTVSWNSGALTSGVHTFPAVLQSSGLYSLSSVVTVPSSSLGTKTYTCNVDHKPSNTKVDKRVESKYGPPLLQGSG

SEQ ID NO: 608 - protein, 239 aa, synthetic construct
EVQLVESGGGLVQPGGSLRLSCAASGFTVSNYEMNWVRQAPGKGLEWVSYISSSTSNIYYADSVKGRFTISRDNAENSLYLQMNSLRVEDTAVYYCVRDGIVVVPVGRGYYYYGLDVWGQGTTVTVSSASTKGPSVFPLAPCSRSTSESTAALGCLVKDYFPEPVTVSWNSGALTSGVHTFPAVLQSSGLYSLSSVVTVPSSSLGTKTYTCNVDHKPSNTKVDKRVESKYGPPLLQGSG

SEQ ID NO: 609 - protein, 237 aa, synthetic construct
QVQLVESGGGVVQPGRSLRLSCAASGFPFSNYVMYWVRQAPGKGLEWVALIFFDGKKNYHADSVKGRFTITRDNSKNMLYLQMNSLRPEDAAVYYCAKIHCPNGVCYKGYYGMDVWGQGTTVTVSSASTKGPSVFPLAPCSRSTSESTAALGCLVKDYFPEPVTVSWNSGALTSGVHTFPAVLQSSGLYSLSSVVTVPSSSLGTKTYTCNVDHKPSNTKVDKRVESKYGPPLLQGSG

SEQ ID NO: 610 - protein, 29 aa, synthetic construct
MHRPRRRGTRPPPLALLAALLLAARGADA

SEQ ID NO: 611 - protein, 111 aa, synthetic construct
ASTKGPSVFPLAPCSRSTSESTAALGCLVKDYFPEPVTVSWNSGALTSGVHTFPAVLQSSGLYSLSSVVTVPSSSLGTKTYTCNVDHKPSNTKVDKRVESKYGPPLLQGSG

SEQ ID NO: 612 - protein, 29 aa, synthetic construct
MHRPRRRGTRPPPLALLAALLLAARGADA

SEQ ID NO: 613 - DNA, 141 bp, synthetic construct
  source 1..141: mol_type = other DNA
aggaacccctagtgatggagttggccactccctctctgcgcgctcgctcgctcactgaggccgggcgaccaaaggtcgcccgacgcccgggctttgcccgggcggcctcagtgagcgagcgagcgcgcagctgcctgcagg

SEQ ID NO: 614 - DNA, 130 bp, synthetic construct
  source 1..130: mol_type = other DNA
aggaacccctagtgatggagttggccactccctctctgcgcgctcgctcgctcactgaggccgggcgaccaaaggtcgcccgacgcccgggctttgcccgggcggcctcagtgagcgagcgagcgcgcag

SEQ ID NO: 615 - DNA, 227 bp, synthetic construct
  source 1..227: mol_type = other DNA
tcagccataccacatttgtagaggttttacttgctttaaaaaacctcccacacctccccctgaacctgaaacataaaatgaatgcaattgttgttgttaacttgtttattgcagcttataatggttacaaataaagcaatagcatcacaaatttcacaaataaagcatttttttcactgcattctagttgtggtttgtccaaactcatcaatgtatcttatcatgtc

SEQ ID NO: 616 - protein, 15 aa, synthetic construct
GGGGSGGGGSGGGGS

SEQ ID NO: 617 - protein, 10 aa, synthetic construct
GGGGSGGGGS

SEQ ID NO: 618 - DNA, 45 bp, synthetic construct
  source 1..45: mol_type = other DNA
ggcggcggcggaagcggagggggaggatcaggaggaggcggatcc

SEQ ID NO: 619 - DNA, 45 bp, synthetic construct
  source 1..45: mol_type = other DNA
ggtggtggtggaagtggtggtggtggcagtggtggtggtggatct

SEQ ID NO: 620 - DNA, 45 bp, synthetic construct
  source 1..45: mol_type = other DNA
ggaggaggaggctctggaggaggaggctctggagggggaggctct

SEQ ID NO: 621 - DNA, 45 bp, synthetic construct
  source 1..45: mol_type = other DNA
gggggtgggggctctggggggggaggcagtggaggaggtggctct

SEQ ID NO: 622 - DNA, 45 bp, synthetic construct
  source 1..45: mol_type = other DNA
ggaggtgggggctcaggaggaggtggctctggaggaggaggctca

SEQ ID NO: 623 - DNA, 30 bp, synthetic construct
  source 1..30: mol_type = other DNA
ggaggtggtggaagtggaggtggtggaagt

SEQ ID NO: 624 - DNA, 30 bp, synthetic construct
  source 1..30: mol_type = other DNA
ggtggtggtggtagtggtggtggtggctct

SEQ ID NO: 625 - DNA, 30 bp, synthetic construct
  source 1..30: mol_type = other DNA
ggtgggggtggctctgggggtggaggcagt

SEQ ID NO: 626 - DNA, 30 bp, synthetic construct
  source 1..30: mol_type = other DNA
ggaggtggaggctctggaggaggtggcagt

SEQ ID NO: 627 - DNA, 30 bp, synthetic construct
  source 1..30: mol_type = other DNA
ggtggtggtggcagtggtggtggtggttct

SEQ ID NO: 628 - DNA, 30 bp, synthetic construct
  source 1..30: mol_type = other DNA
ggtggaggtggctcagggggaggaggcagt

SEQ ID NO: 629 - DNA, 30 bp, synthetic construct
  source 1..30: mol_type = other DNA
gggggaggaggctcaggtgggggtggcagt

SEQ ID NO: 630 - DNA, 15 bp, synthetic construct
  source 1..15: mol_type = other DNA
ggtggtggtggctct

SEQ ID NO: 631 - protein, 105 aa, synthetic construct
ASTKGPSVFPLAPCSRSTSESTAALGCLVKDYFPEPVTVSWNSGALTSGVHTFPAVLQSSGLYSLSSVVTVPSSSLGTKTYTCNVDHKPSNTKVDKRVESKYGPP

SEQ ID NO: 632 - protein, 112 aa, synthetic construct
DIQLTQSPLSLPVTPGEPASISCRSSQSLLHSNGYNYLDWYLQKPGQSPQFLIYLGSNRASGVPDRFSGSGSGTDFTLKINRVEAEDVGVYYCMQALQTPYTFGQGTKVEIK

SEQ ID NO: 633 - protein, 227 aa, synthetic construct
EVQLVESGGDLVQPGRSLRLSCAASGFTFDDYAMHWVRQAPGKGLEWVSGISWNSATRVYADSVKGRFTISRDNAKNFLYLQMNSLRSEDTALYHCAKDMDISLGYYGLDVWGQGTTVTVSSASTKGPSVFPLAPCSRSTSESTAALGCLVKDYFPEPVTVSWNSGALTSGVHTFPAVLQSSGLYSLSSVVTVPSSSLGTKTYTCNVDHKPSNTKVDKRVESKYGPP

SEQ ID NO: 634 - protein, 229 aa, synthetic construct
QITLKESGPTLVKPTQTLTLTCTFSGFSLSTSGVGVVWIRQPPGKALEWLALIYWNDHKRYSPSLGSRLTITKDTSKNQVVLTMTNMDPVDTATYYCAHYSGSYSYYYYGLDVWGQGTTVTVSSASTKGPSVFPLAPCSRSTSESTAALGCLVKDYFPEPVTVSWNSGALTSGVHTFPAVLQSSGLYSLSSVVTVPSSSLGTKTYTCNVDHKPSNTKVDKRVESKYGPP

SEQ ID NO: 635 - protein, 226 aa, synthetic construct
EVQLVESGGGLVQPGRSLRLSCAASGFTFDDYAMNWVRQAPGKGLEWVSGISWSSGSMDYADSVKGRFTISRDNAKNSLYLQMNSLRTEDTALYYCAKAREVGDYYGMDVWGQGTTVTVSSASTKGPSVFPLAPCSRSTSESTAALGCLVKDYFPEPVTVSWNSGALTSGVHTFPAVLQSSGLYSLSSVVTVPSSSLGTKTYTCNVDHKPSNTKVDKRVESKYGPP

SEQ ID NO: 636 - protein, 224 aa, synthetic construct
EVQLVESGGGLVQPGGSLRLSCAASGFTFNIFEMNWVRQAPGKGLEWISYISSRGTTTYYADSVRGRFTISRDNAKNSLYLQMNSLRAEDTAVYYCARDYEATIPFDFWGQGTLVTVSSASTKGPSVFPLAPCSRSTSESTAALGCLVKDYFPEPVTVSWNSGALTSGVHTFPAVLQSSGLYSLSSVVTVPSSSLGTKTYTCNVDHKPSNTKVDKRVESKYGPP

SEQ ID NO: 637 - protein, 233 aa, synthetic construct
EVQLVESGGGLVQPGGSLRLSCAASGFTVSNYEMNWVRQAPGKGLEWVSYISSSTSNIYYADSVKGRFTISRDNAENSLYLQMNSLRVEDTAVYYCVRDGIVVVPVGRGYYYYGLDVWGQGTTVTVSSASTKGPSVFPLAPCSRSTSESTAALGCLVKDYFPEPVTVSWNSGALTSGVHTFPAVLQSSGLYSLSSVVTVPSSSLGTKTYTCNVDHKPSNTKVDKRVESKYGPP

SEQ ID NO: 638 - protein, 231 aa, synthetic construct
QVQLVESGGGVVQPGRSLRLSCAASGFPFSNYVMYWVRQAPGKGLEWVALIFFDGKKNYHADSVKGRFTITRDNSKNMLYLQMNSLRPEDAAVYYCAKIHCPNGVCYKGYYGMDVWGQGTTVTVSSASTKGPSVFPLAPCSRSTSESTAALGCLVKDYFPEPVTVSWNSGALTSGVHTFPAVLQSSGLYSLSSVVTVPSSSLGTKTYTCNVDHKPSNTKVDKRVESKYGPP

SEQ ID NO: 639 - protein, 700 aa, synthetic construct
HHHHHHEQKLISEEDLGGEQKLISEEDLCKGVEPKTECERLAGTESPVREEPGEDFPAARRLYWDDLKRKLSEKLDSTDFTGTIKLLNENSYVPREAGSQKDENLALYVENQFREFKLSKVWRDQHFVKIQVKDSAQNSVIIVDKNGRLVYLVENPGGYVAYSKAATVTGKLVHANFGTKKDFEDLYTPVNGSIVIVRAGKITFAEKVANAESLNAIGVLIYMDQTKFPIVNAELSFFGHAHLGTGDPYTPGFPSFNHTQFPPSRSSGLPNIPVQTISRAAAEKLFGNMEGDCPSDWKTDSTCRMVTSESKNVKLTVSNVLKEIKILNIFGVIKGFVEPDHYVVVGAQRDAWGPGAAKSGVGTALLLKLAQMFSDMVLKDGFQPSRSIIFASWSAGDFGSVGATEWLEGYLSSLHLKAFTYINLDKAVLGTSNFKVSASPLLYTLIEKTMQNVKHPVTGQFLYQDSNWASKVEKLTLDNAAFPFLAYSGIPAVSFCFCEDTDYPYLGTTMDTYKELIERIPELNKVARAAAEVAGQFVIKLTHDVELNLDYERYNSQLLSFVRDLNQYRADIKEMGLSLQWLYSARGDFFRATSRLTTDFGNAEKTDRFVMKKLNDRVMRVEYHFLSPYVSPKESPFRHVFWGSGSHTLPALLENLKLRKQNNGAFNETLFRNQLALATWTIQGAANALSGDVWDIDNEF

SEQ ID NO: 640 - protein, 28 aa, synthetic construct
EQKLISEEDLGGEQKLISEEDLHHHHHH

SEQ ID NO: 641 - protein, 28 aa, synthetic construct
HHHHHHEQKLISEEDLGGEQKLISEEDL

SEQ ID NO: 642 - DNA, 20 bp, synthetic construct
  source 1..20: mol_type = other DNA
gctgcattgcggactgtaga

SEQ ID NO: 643 - DNA, 23 bp, synthetic construct
  source 1..23: mol_type = other DNA
tccatcattctcagctgctacaa

SEQ ID NO: 644 - protein, 1168 aa, synthetic construct
MHRPRRRGTRPPPLALLAALLLAARGADADIQMTQSPSSVSASVGDRVTITCRASQGIASWLAWYQQKPGKAPELLIYAASSLQGGVPSRFSGSGSGTDFTLTISSLQPEDFAIYYCQQANYFPWTFGQGTKVEIKGGGGSGGGGSGGGGSQITLKESGPTLVKPTQTLTLTCTFSGFSLSTSGVGVVWIRQPPGKALEWLALIYWNDHKRYSPSLGSRLTITKDTSKNQVVLTMTNMDPVDTATYYCAHYSGSYSYYYYGLDVWGQGTTVTVSSGGGGSGGGGSAHPGRPRAVPTQCDVPPNSRFDCAPDKAITQEQCEARGCCYIPAKQGLQGAQMGQPWCFFPPSYPSYKLENLSSSEMGYTATLTRTTPTFFPKDILTLRLDVMMETENRLHFTIKDPANRRYEVPLETPHVHSRAPSPLYSVEFSEEPFGVIVRRQLDGRVLLNTTVAPLFFADQFLQLSTSLPSQYITGLAEHLSPLMLSTSWTRITLWNRDLAPTPGANLYGSHPFYLALEDGGSAHGVFLLNSNAMDVVLQPSPALSWRSTGGILDVYIFLGPEPKSVVQQYLDVVGYPFMPPYWGLGFHLCRWGYSSTAITRQVVENMTRAHFPLDVQWNDLDYMDSRRDFTFNKDGFRDFPAMVQELHQGGRRYMMIVDPAISSSGPAGSYRPYDEGLRRGVFITNETGQPLIGKVWPGSTAFPDFTNPTALAWWEDMVAEFHDQVPFDGMWIDMNEPSNFIRGSEDGCPNNELENPPYVPGVVGGTLQAATICASSHQFLSTHYNLHNLYGLTEAIASHRALVKARGTRPFVISRSTFAGHGRYAGHWTGDVWSSWEQLASSVPEILQFNLLGVPLVGADVCGFLGNTSEELCVRWTQLGAFYPFMRNHNSLLSLPQEPYSFSEPAQQAMRKALTLRYALLPHLYTLFHQAHVAGETVARPLFLEFPKDSSTWTVDHQLLWGEALLITPVLQAGKAEVTGYFPLGTWYDLQTVPVEALGSLPPPPAAPREPAIHSEGQWVTLPAPLDTINVHLRAGYIIPLQGPGLTTTESRQQPMALAVALTKGGEARGELFWDDGESLEVLERGAYTQVIFLARNNTIVNELVRVTSEGAGLQLQKVTVLGVATAPQQVLSNGVPVSNFTYSPDTKVLDICVSLLMGEQFLVSWC

SEQ ID NO: 645 - protein, 1171 aa, synthetic construct
MHRPRRRGTRPPPLALLAALLLAARGADADIQMTQSPSSLSASVGDRVTITCRASQSISSYLNWYQQKPGKAPKLLIYAASSLQSGVPSRFSGSGSGTDFTLTISSLQPEDFATYYCQQSYSTPPITFGQGTRLEIKGGGGSGGGGSGGGGSQVQLVESGGGVVQPGRSLRLSCAASGFPFSNYVMYWVRQAPGKGLEWVALIFFDGKKNYHADSVKGRFTITRDNSKNMLYLQMNSLRPEDAAVYYCAKIHCPNGVCYKGYYGMDVWGQGTTVTVSSGGGGSGGGGSAHPGRPRAVPTQCDVPPNSRFDCAPDKAITQEQCEARGCCYIPAKQGLQGAQMGQPWCFFPPSYPSYKLENLSSSEMGYTATLTRTTPTFFPKDILTLRLDVMMETENRLHFTIKDPANRRYEVPLETPHVHSRAPSPLYSVEFSEEPFGVIVRRQLDGRVLLNTTVAPLFFADQFLQLSTSLPSQYITGLAEHLSPLMLSTSWTRITLWNRDLAPTPGANLYGSHPFYLALEDGGSAHGVFLLNSNAMDVVLQPSPALSWRSTGGILDVYIFLGPEPKSVVQQYLDVVGYPFMPPYWGLGFHLCRWGYSSTAITRQVVENMTRAHFPLDVQWNDLDYMDSRRDFTFNKDGFRDFPAMVQELHQGGRRYMMIVDPAISSSGPAGSYRPYDEGLRRGVFITNETGQPLIGKVWPGSTAFPDFTNPTALAWWEDMVAEFHDQVPFDGMWIDMNEPSNFIRGSEDGCPNNELENPPYVPGVVGGTLQAATICASSHQFLSTHYNLHNLYGLTEAIASHRALVKARGTRPFVISRSTFAGHGRYAGHWTGDVWSSWEQLASSVPEILQFNLLGVPLVGADVCGFLGNTSEELCVRWTQLGAFYPFMRNHNSLLSLPQEPYSFSEPAQQAMRKALTLRYALLPHLYTLFHQAHVAGETVARPLFLEFPKDSSTWTVDHQLLWGEALLITPVLQAGKAEVTGYFPLGTWYDLQTVPVEALGSLPPPPAAPREPAIHSEGQWVTLPAPLDTINVHLRAGYIIPLQGPGLTTTESRQQPMALAVALTKGGEARGELFWDDGESLEVLERGAYTQVIFLARNNTIVNELVRVTSEGAGLQLQKVTVLGVATAPQQVLSNGVPVSNFTYSPDTKVLDICVSLLMGEQFLVSWC

SEQ ID NO: 646 - protein, 1164 aa, synthetic construct
MHRPRRRGTRPPPLALLAALLLAARGADADIQMTQSPSSLSASVGDRVTITCRASQSISSYLNWYQQKPGKAPKLLIYAASSLQSGVPSRFSGSGSGTDFTLTISSLQPEDFATYYCQQSYSTPPITFGQGTRLEIKGGGGSGGGGSGGGGSEVQLVESGGGLVQPGGSLRLSCAASGFTFNIFEMNWVRQAPGKGLEWISYISSRGTTTYYADSVRGRFTISRDNAKNSLYLQMNSLRAEDTAVYYCARDYEATIPFDFWGQGTLVTVSSGGGGSGGGGSAHPGRPRAVPTQCDVPPNSRFDCAPDKAITQEQCEARGCCYIPAKQGLQGAQMGQPWCFFPPSYPSYKLENLSSSEMGYTATLTRTTPTFFPKDILTLRLDVMMETENRLHFTIKDPANRRYEVPLETPHVHSRAPSPLYSVEFSEEPFGVIVRRQLDGRVLLNTTVAPLFFADQFLQLSTSLPSQYITGLAEHLSPLMLSTSWTRITLWNRDLAPTPGANLYGSHPFYLALEDGGSAHGVFLLNSNAMDVVLQPSPALSWRSTGGILDVYIFLGPEPKSVVQQYLDVVGYPFMPPYWGLGFHLCRWGYSSTAITRQVVENMTRAHFPLDVQWNDLDYMDSRRDFTFNKDGFRDFPAMVQELHQGGRRYMMIVDPAISSSGPAGSYRPYDEGLRRGVFITNETGQPLIGKVWPGSTAFPDFTNPTALAWWEDMVAEFHDQVPFDGMWIDMNEPSNFIRGSEDGCPNNELENPPYVPGVVGGTLQAATICASSHQFLSTHYNLHNLYGLTEAIASHRALVKARGTRPFVISRSTFAGHGRYAGHWTGDVWSSWEQLASSVPEILQFNLLGVPLVGADVCGFLGNTSEELCVRWTQLGAFYPFMRNHNSLLSLPQEPYSFSEPAQQAMRKALTLRYALLPHLYTLFHQAHVAGETVARPLFLEFPKDSSTWTVDHQLLWGEALLITPVLQAGKAEVTGYFPLGTWYDLQTVPVEALGSLPPPPAAPREPAIHSEGQWVTLPAPLDTINVHLRAGYIIPLQGPGLTTTESRQQPMALAVALTKGGEARGELFWDDGESLEVLERGAYTQVIFLARNNTIVNELVRVTSEGAGLQLQKVTVLGVATAPQQVLSNGVPVSNFTYSPDTKVLDICVSLLMGEQFLVSWC

SEQ ID NO: 647 - protein, 1166 aa, synthetic construct
MHRPRRRGTRPPPLALLAALLLAARGADADIQMTQSPSSLSASVGDRVTITCRASQSISSYLNWYQQKPGKAPKLLIYAASSLQSGVPSRFSGSGSGTDFTLTISSLQPEDFATYYCQQSYSTPPITFGQGTRLEIKGGGGSGGGGSGGGGSEVQLVESGGGLVQPGRSLRLSCAASGFTFDDYAMNWVRQAPGKGLEWVSGISWSSGSMDYADSVKGRFTISRDNAKNSLYLQMNSLRTEDTALYYCAKAREVGDYYGMDVWGQGTTVTVSSGGGGSGGGGSAHPGRPRAVPTQCDVPPNSRFDCAPDKAITQEQCEARGCCYIPAKQGLQGAQMGQPWCFFPPSYPSYKLENLSSSEMGYTATLTRTTPTFFPKDILTLRLDVMMETENRLHFTIKDPANRRYEVPLETPHVHSRAPSPLYSVEFSEEPFGVIVRRQLDGRVLLNTTVAPLFFADQFLQLSTSLPSQYITGLAEHLSPLMLSTSWTRITLWNRDLAPTPGANLYGSHPFYLALEDGGSAHGVFLLNSNAMDVVLQPSPALSWRSTGGILDVYIFLGPEPKSVVQQYLDVVGYPFMPPYWGLGFHLCRWGYSSTAITRQVVENMTRAHFPLDVQWNDLDYMDSRRDFTFNKDGFRDFPAMVQELHQGGRRYMMIVDPAISSSGPAGSYRPYDEGLRRGVFITNETGQPLIGKVWPGSTAFPDFTNPTALAWWEDMVAEFHDQVPFDGMWIDMNEPSNFIRGSEDGCPNNELENPPYVPGVVGGTLQAATICASSHQFLSTHYNLHNLYGLTEAIASHRALVKARGTRPFVISRSTFAGHGRYAGHWTGDVWSSWEQLASSVPEILQFNLLGVPLVGADVCGFLGNTSEELCVRWTQLGAFYPFMRNHNSLLSLPQEPYSFSEPAQQAMRKALTLRYALLPHLYTLFHQAHVAGETVARPLFLEFPKDSSTWTVDHQLLWGEALLITPVLQAGKAEVTGYFPLGTWYDLQTVPVEALGSLPPPPAAPREPAIHSEGQWVTLPAPLDTINVHLRAGYIIPLQGPGLTTTESRQQPMALAVALTKGGEARGELFWDDGESLEVLERGAYTQVIFLARNNTIVNELVRVTSEGAGLQLQKVTVLGVATAPQQVLSNGVPVSNFTYSPDTKVLDICVSLLMGEQFLVSWC

SEQ ID NO: 648 - DNA, 2649 bp, Homo sapiens
  source 1..2649: mol_type = other DNA
gcacaccccggccgtcccagagcagtgcccacacagtgcgacgtcccccccaacagccgcttcgattgcgcccctgacaaggccatcacccaggaacagtgcgaggcccgcggctgttgctacatccctgcaaagcaggggctgcagggagcccagatggggcagccctggtgcttcttcccacccagctaccccagctacaagctggagaacctgagctcctctgaaatgggctacacggccaccctgacccgtaccacccccaccttcttccccaaggacatcctgaccctgcggctggacgtgatgatggagactgagaaccgcctccacttcacgatcaaagatccagctaacaggcgctacgaggtgcccttggagaccccgcatgtccacagccgggcaccgtccccactctacagcgtggagttctccgaggagcccttcggggtgatcgtgcgccggcagctggacggccgcgtgctgctgaacacgacggtggcgcccctgttctttgcggaccagttccttcagctgtccacctcgctgccctcgcagtatatcacaggcctcgccgagcacctcagtcccctgatgctcagcaccagctggaccaggatcaccctgtggaaccgggaccttgcgcccacgcccggtgcgaacctctacgggtctcaccctttctacctggcgctggaggacggcgggtcggcacacggggtgttcctgctaaacagcaatgccatggatgtggtcctgcagccgagccctgcccttagctggaggtcgacaggtgggatcctggatgtctacatcttcctgggcccagagcccaagagcgtggtgcagcagtacctggacgttgtgggatacccgttcatgccgccatactggggcctgggcttccacctgtgccgctggggctactcctccaccgctatcacccgccaggtggtggagaacatgaccagggcccacttccccctggacgtccagtggaacgacctggactacatggactcccggagggacttcacgttcaacaaggatggcttccgggacttcccggccatggtgcaggagctgcaccagggcggccggcgctacatgatgatcgtggatcctgccatcagcagctcgggccctgccgggagctacaggccctacgacgagggtctgcggaggggggttttcatcaccaacgagaccggccagccgctgattgggaaggtatggcccgggtccactgccttccccgacttcaccaaccccacagccctggcctggtgggaggacatggtggctgagttccatgaccaggtgcccttcgacggcatgtggattgacatgaacgagccttccaacttcatcaggggctctgaggacggctgccccaacaatgagctggagaacccaccctacgtgcctggggtggttggggggaccctccaggcggccaccatctgtgcctccagccaccagtttctctccacacactacaacctgcacaacctctacggcctgaccgaagccatcgcctcccacagggcgctggtgaaggctcgggggacacgcccatttgtgatctcccgctcgacctttgctggccacggccgatacgccggccactggacgggggacgtgtggagctcctgggagcagctcgcctcctccgtgccagaaatcctgcagtttaacctgctgggggtgcctctggtcggggccgacgtctgcggcttcctgggcaacacctcagaggagctgtgtgtgcgctggacccagctgggggccttctaccccttcatgcggaaccacaacagcctgctcagtctgccccaggagccgtacagcttcagcgagccggcccagcaggccatgaggaaggccctcaccctgcgctacgcactcctcccccacctctacacactgttccaccaggcccacgtcgcgggggagaccgtggcccggcccctcttcctggagttccccaaggactctagcacctggactgtggaccaccagctcctgtggggggaggccctgctcatcaccccagtgctccaggccgggaaggccgaagtgactggctacttccccttgggcacatggtacgacctgcagacggtgccagtagaggcccttggcagcctcccacccccacctgcagctccccgtgagccagccatccacagcgaggggcagtgggtgacgctgccggcccccctggacaccatcaacgtccacctccgggctgggtacatcatccccctgcagggccctggcctcacaaccacagagtcccgccagcagcccatggccctggctgtggccctgaccaagggtggggaggcccgaggggagctgttctgggacgatggagagagcctggaagtgctggagcgaggggcctacacacaggtcatcttcctggccaggaataacacgatcgtgaatgagctggtacgtgtgaccagtgagggagctggcctgcagctgcagaaggtgactgtcctgggcgtggccacggcgccccagcaggtcctctccaacggtgtccctgtctccaacttcacctacagccccgacaccaaggtcctggacatctgtgtctcgctgttgatgggagagcagtttctcgtcagctggtgt

SEQ ID NO: 649 - DNA, 2649 bp, synthetic construct
  source 1..2649: mol_type = other DNA
gcccatcctggcagacctagagctgtgcccacacagtgtgatgtgcctccaaacagcagatttgactgtgcccctgacaaggccatcacacaagagcagtgtgaagccagaggctgctgttacatccctgccaagcaaggactgcaaggggctcagatgggacagccctggtgcttcttcccaccatcttaccccagctacaagctggaaaacctgagcagctctgagatgggctacactgctacactgaccagaaccacacctacattcttcccaaaggacatcctgacactgaggctggatgtgatgatggaaacagagaacaggctgcacttcaccatcaaggaccctgccaatagaagatatgaggtgcccctggaaacccctcatgtgcactctagagccccatctccactgtactctgtggaattttctgaggaaccctttggggtcatagtcagaaggcagctggatggcagagtgctgctgaacacaactgtggcccctctgttctttgctgatcagttcctgcagctgagcaccagcctgcctagccagtatatcacaggcctggcagagcacctgtctccactgatgctgagcacatcctggaccagaatcaccctgtggaacagagacctggctcccacacctggggccaacctgtatggctctcaccccttctatctggccctggaagatggtggttcagcccatggtgtctttctgctgaactccaatgccatggatgtggtgctgcagccctctcctgctctgtcttggagaagcactggtggcatcctggatgtgtacatctttctgggccctgagcctaagtctgtggtgcagcagtacctggatgttgtgggctaccccttcatgcctccttattggggcctgggcttccacctgtgcagatggggatacagcagcacagccatcaccagacaggttgtggaaaacatgaccagagcacacttcccactggatgtgcagtggaatgacctggactacatggacagcagaagggacttcaccttcaacaaggatggcttcagagacttccctgccatggtgcaagagctgcaccaaggtggtagaagatatatgatgattgtggacccagccatcagctcctctggaccagctggcagctacagaccctatgatgagggactgagaagaggggtgttcatcaccaatgagacaggccagcctctgattggcaaagtgtggccaggctccacagcctttccagatttcacaaaccccacagctctggcttggtgggaagatatggtggcagagttccatgatcaggtgccctttgatggcatgtggattgacatgaatgagcccagcaacttcatcaggggctctgaggatggatgccccaacaatgaactggaaaatcctccttatgtgcctggtgttgttggagggacactgcaggcagccacaatttgtgccagctctcaccagtttctgagcacccactacaacctgcacaatctgtatggcctgactgaggccattgccagccacagggctcttgtgaaggctagaggcaccagaccttttgtgatcagcaggtccacctttgctggccatggcagatatgctggccactggactggggatgtgtggtctagttgggagcagctggctagctctgtgcctgagatcctgcagttcaacctgctgggagtgccccttgttggagcagatgtgtgtggcttcctgggcaacacctcagaggaactgtgtgtcagatggactcagctgggagcattctaccctttcatgagaaaccacaacagcctgctgagcctgcctcaagagccttacagcttttctgagccagcacagcaggccatgagaaaggccctgactctgagatatgccctgctgcctcacctgtacaccctgttccatcaggctcatgtggctggggagactgtggctagacccctgttcctggaattccccaaggacagctccacctggacagtggatcatcagctgctgtggggagaagccctgctgattacacctgtgctgcaggctggcaaggctgaagtgacaggctacttccctcttggcacttggtatgacctgcagacagtgcctgtggaagctctgggatctctgcctccacctcctgctgctcctagagagcctgccattcactctgaaggccagtgggttaccctgcctgctccactggataccatcaatgtgcatctgagagcaggctacatcatccctctgcaaggccctggcctgaccaccacagaatctagacagcagccaatggcactggctgtggccctgaccaaaggtggagaagctagaggggagctgttctgggatgatggggagagcctggaagtgctggaaagaggggcctatacacaagtgatttttctggctaggaacaataccattgtgaatgagcttgtcagagtcacctctgaaggtgctggcctgcagctccagaaagtgacagtgcttggagtggccacagcaccccagcaagtgctgtctaatggggtgccagtgtccaacttcacatacagccctgataccaaggtcctggacatctgtgtgtccctgcttatgggagagcagttcctggtgtcttggtgc

SEQ ID NO: 650 - DNA, 3384 bp, synthetic construct
  source 1..3384: mol_type = other DNA
caggtccagctgcaagagtctggccccaaggtggtcaagccctctgagacactgagcctgacctgcacagtgtctggtggcagcatcagcagctactactggaactggatcagacagagccctggcaaaggcctggaatggattggctacaccaagagaggctacacagactacaaccccagcctgagaagcagagtgaccatctctgaggacaccagcaagaaccagttcagcctgaggatcagctctgtgacagctgctgacacagcagtgtactactgtgcccagatgggctggggcagccatgcctttgatatgtggggccagggcacaatggtggctgtgtccagtgggggctcaggaggaggtggctcaggaggtggaggttcaggaggggagattgtgctgacccagtctcctggcacactgtctctgagccctggggaaagagccacactgagctgtagagccagccagtctgtgtcctctagctacctggcctggtatcagcagaagcctggacaggctcccagactgctgatctatggggcctcttctagagccacaggcatccctgacagattcagtggcagtggctctggcacagacttcaccctgaccatcagcagactggaacctgaggactttgctgtgtactattgccagcagtatggcagcagcccctggacatttggacagggcaccaaggtggaaatcaaaggtggtggtggctctgcccatcctggcagacctagagctgtgcccacacagtgtgatgtgcctccaaacagcagatttgactgtgcccctgacaaggccatcacacaagagcagtgtgaagccagaggctgctgttacatccctgccaagcaaggactgcaaggggctcagatgggacagccctggtgcttcttcccaccatcttaccccagctacaagctggaaaacctgagcagctctgagatgggctacactgctacactgaccagaaccacacctacattcttcccaaaggacatcctgacactgaggctggatgtgatgatggaaacagagaacaggctgcacttcaccatcaaggaccctgccaatagaagatatgaggtgcccctggaaacccctcatgtgcactctagagccccatctccactgtactctgtggaattttctgaggaaccctttggggtcatagtcagaaggcagctggatggcagagtgctgctgaacacaactgtggcccctctgttctttgctgatcagttcctgcagctgagcaccagcctgcctagccagtatatcacaggcctggcagagcacctgtctccactgatgctgagcacatcctggaccagaatcaccctgtggaacagagacctggctcccacacctggggccaacctgtatggctctcaccccttctatctggccctggaagatggtggttcagcccatggtgtctttctgctgaactccaatgccatggatgtggtgctgcagccctctcctgctctgtcttggagaagcactggtggcatcctggatgtgtacatctttctgggccctgagcctaagtctgtggtgcagcagtacctggatgttgtgggctaccccttcatgcctccttattggggcctgggcttccacctgtgcagatggggatacagcagcacagccatcaccagacaggttgtggaaaacatgaccagagcacacttcccactggatgtgcagtggaatgacctggactacatggacagcagaagggacttcaccttcaacaaggatggcttcagagacttccctgccatggtgcaagagctgcaccaaggtggtagaagatatatgatgattgtggacccagccatcagctcctctggaccagctggcagctacagaccctatgatgagggactgagaagaggggtgttcatcaccaatgagacaggccagcctctgattggcaaagtgtggccaggctccacagcctttccagatttcacaaaccccacagctctggcttggtgggaagatatggtggcagagttccatgatcaggtgccctttgatggcatgtggattgacatgaatgagcccagcaacttcatcaggggctctgaggatggatgccccaacaatgaactggaaaatcctccttatgtgcctggtgttgttggagggacactgcaggcagccacaatttgtgccagctctcaccagtttctgagcacccactacaacctgcacaatctgtatggcctgactgaggccattgccagccacagggctcttgtgaaggctagaggcaccagaccttttgtgatcagcaggtccacctttgctggccatggcagatatgctggccactggactggggatgtgtggtctagttgggagcagctggctagctctgtgcctgagatcctgcagttcaacctgctgggagtgccccttgttggagcagatgtgtgtggcttcctgggcaacacctcagaggaactgtgtgtcagatggactcagctgggagcattctaccctttcatgagaaaccacaacagcctgctgagcctgcctcaagagccttacagcttttctgagccagcacagcaggccatgagaaaggccctgactctgagatatgccctgctgcctcacctgtacaccctgttccatcaggctcatgtggctggggagactgtggctagacccctgttcctggaattccccaaggacagctccacctggacagtggatcatcagctgctgtggggagaagccctgctgattacacctgtgctgcaggctggcaaggctgaagtgacaggctacttccctcttggcacttggtatgacctgcagacagtgcctgtggaagctctgggatctctgcctccacctcctgctgctcctagagagcctgccattcactctgaaggccagtgggttaccctgcctgctccactggataccatcaatgtgcatctgagagcaggctacatcatccctctgcaaggccctggcctgaccaccacagaatctagacagcagccaatggcactggctgtggccctgaccaaaggtggagaagctagaggggagctgttctgggatgatggggagagcctggaagtgctggaaagaggggcctatacacaagtgatttttctggctaggaacaataccattgtgaatgagcttgtcagagtcacctctgaaggtgctggcctgcagctccagaaagtgacagtgcttggagtggccacagcaccccagcaagtgctgtctaatggggtgccagtgtccaacttcacatacagccctgataccaaggtcctggacatctgtgtgtccctgcttatgggagagcagttcctggtgtcttggtgc

SEQ ID NO: 651 - DNA, 2649 bp, synthetic construct
  source 1..2649: mol_type = other DNA
gcacatccaggcaggcccagagcagttcccacacaatgtgatgtcccccccaactcaaggtttgattgtgcccctgataaggctatcactcaggaacagtgtgaagctaggggctgttgctacattcctgcaaagcagggactgcagggagcccagatggggcagccttggtgctttttcccaccatcttaccccagctacaaactagagaacctgagctcctctgaaatgggctacactgccactctaaccagaaccacccccactttctttcccaaggacatcctgaccctgagactagatgtgatgatggagactgagaataggctccactttactatcaaagatccagctaacaggaggtatgaggtgcctttggagacaccccatgtccacagcagagcaccctccccactctacagtgttgagtttagtgaggaaccttttggtgtgatagttaggagacagttggatggtagggtgctgttgaacacaactgtggcacccctgttctttgcagaccaattccttcagttgtccacctccctgccttcacagtatatcacaggcctggcagagcacctcagtcccttgatgctctcaacctcttggactagaatcaccctctggaacagggaccttgcacccacacctggtgcaaacctctatgggtctcaccctttttacttggcactggaagatggagggtctgcacatggggtgttcttactaaattcaaatgccatggatgtggtcctgcagccaagccctgcccttagctggaggagcacaggtgggatattggatgtctacattttcctgggcccagagccaaagtcagtggtgcaacagtacctggatgttgttggatatccctttatgcctccatactggggcctgggcttccacctgtgcaggtggggctacagttccacagctataaccagacaggtggtggagaacatgacaagagcccacttcccactggatgtccaatggaatgatctggattatatggattccaggagggacttcacatttaataaggatggcttcagggactttccagccatggtgcaggagctgcatcagggaggcaggagatatatgatgatagtggatcctgccatcagcagcagtggccctgcagggtcatacaggccctatgatgagggtctgaggaggggagtttttataaccaatgagacaggccaacccctgattgggaaagtatggccaggatccactgcttttccagacttcaccaaccccacagccttagcctggtgggaggacatggtggctgagttccatgaccaggttccctttgatggcatgtggattgatatgaatgaacctagtaactttataaggggctctgaagatggctgccccaataatgaactggagaatccaccctatgtgcctggggtggttggggggactctccaggcagccaccatatgtgcatcctcacatcagtttctctccacacactacaaccttcataacctctatggccttacagaagccatagcatcccatagggcactggttaaggctagggggacaaggccatttgtgatctccaggagtacttttgctggccatggcaggtatgctggccattggacaggggatgtgtggtcatcctgggagcagctggcctccagtgttccagaaatactgcagtttaatcttttgggggttcctctggttggggcagatgtatgtggctttctgggcaacacctcagaagaactgtgtgttaggtggacccagctaggtgccttctaccccttcatgaggaatcacaatagcctattaagtctgccacaggagccatattctttcagtgagccagcccaacaggctatgaggaaagccctcaccctgaggtatgcactcctcccccacctttacacattattccaccaggcccatgtggcaggagagacagtggccaggcccctcttccttgaattccccaaagattctagcacctggactgtggaccatcagctcctgtggggggaggcactgctcatcacaccagtgttacaggcagggaaggctgaagtgactggctattttccattgggcacatggtatgacctgcagactgtgccagtagaagcccttggcagcctcccacccccacctgcagctccaagggaaccagccatccacagtgaggggcaatgggtaacactgccagctcccctggacaccatcaatgtccaccttagggctgggtacattattcccttgcagggccctggcttaacaaccacagagtctagacaacagcctatggctctggctgtggccctgaccaagggtggagaggccaggggggagttgttctgggatgatggagaaagcctggaagtgctagagaggggggcctacacacaggtcatttttctggctaggaataatacaattgtgaatgaacttgtaagggtgacaagtgagggagctggcctacagctgcagaaggtgactgtcctgggagtggccacagcacctcagcaagtcctctctaatggtgtccctgtctccaatttcacttacagcccagacaccaaagtcctggacatttgtgtcagcctgttgatgggagagcagtttcttgtctcctggtgt

SEQ ID NO: 652 - DNA, 2649 bp, synthetic construct
  source 1..2649: mol_type = other DNA
gcacaccctgggagacccagggcagtacctacccagtgtgatgttcctcccaacagtagatttgactgtgctccagacaaggccatcacacaggaacaatgtgaggccagaggttgctgctacatccctgctaagcaagggctccagggggcccagatggggcagccttggtgcttcttcccacccagctacccctcctacaaactggagaacctgagctcctctgagatgggctacactgccaccctgactagaacaacacctacctttttccctaaggacatcctgactctgaggttagatgtgatgatggaaactgaaaacaggctgcacttcaccatcaaggaccctgccaacaggagatatgaagttcctctggagacacctcatgttcacagcagagccccttcacccctgtattctgtggaattctctgaagaaccatttggagttatagtgagaagacaactggatggcagagtgctcctgaacacaacagtggcccctctgttctttgctgaccagtttctgcagctgagcactagcctgccttcccagtatatcactggcctggctgagcaccttagccctctgatgctcagcacatcttggactagaataacactatggaacagagacctggctccaaccccaggtgctaatctgtatggcagtcatcctttctacctggctctggaggatggagggtctgcccatggtgtgttcctgctgaactcaaatgcaatggatgttgtgttacagcctagccctgcattgagctggagaagtacaggtggaattctggatgtctacatattcttggggcctgagcctaagtctgtagtgcaacagtacctggatgttgttggctacccatttatgcctccctactggggcctaggattccacctgtgcagatggggctactccagtactgccatcaccagacaggtggttgagaacatgaccagggcccactttcctttagatgtgcagtggaatgatctggactacatggatagcagaagggacttcaccttcaacaaggatggttttagagacttccctgccatggtccaggagttgcaccaggggggcagaagatacatgatgatagtagacccagctatcagcagttcaggcccagcagggagctacaggccctatgatgagggcctgagaagaggtgtcttcatcactaatgagacaggccagccactgattggcaaagtgtggcctggctcaactgctttccctgatttcacaaaccctacagccttagcatggtgggaggatatggtggctgaattccatgaccaggtgccatttgatggcatgtggattgacatgaatgagccaagcaacttcatcagaggctctgaggatggctgccccaacaatgaactggaaaaccctccctatgtcccaggagtggtgggaggaaccctgcaggcagctacaatctgtgcctcttcccaccagttcctaagcacccactacaacctccataacctgtatgggttgacagaggccatagcctcccacagagccctggtcaaggctagaggcactaggccatttgtcatctctagatctacctttgctggccatggcaggtatgcaggccactggacaggtgatgtgtggagcagctgggaacaacttgccagcagtgtacctgagatcctccaatttaacctgctgggtgttcccctagtgggagctgatgtatgtgggttcctgggcaatacatcagaagagctctgtgtaaggtggacccagctaggggccttttacccattcatgagaaaccacaactctctcctgagccttccacaagaaccttactctttctctgagcctgctcagcaagccatgaggaaagcactgacattaagatatgcactgctgcctcacctttacaccctgttccaccaggcacatgtggcaggagaaacagtagccagacccctgttcttagagtttcccaaggactcttcaacctggactgtggaccaccagctcctatggggagaggccctgttaatcacccctgtgctgcaggctggtaaggctgaagttacaggctactttcccttaggcacatggtatgatttgcagacagtccctgtggaggccctgggatctcttcctcctcccccagctgctcctagggagcctgcaatccactctgagggacagtgggtaaccctcccagctccactggacaccatcaatgtacaccttagggctggatacattatccccctgcaaggccctggcctgaccacaacagagagcaggcagcagcctatggccctagctgttgcccttaccaagggaggggaagccagaggagagctcttctgggatgatggagagagccttgaagtgcttgaaaggggggcctacacacaagtgatcttcctggccagaaacaacactattgtgaatgagttggtgagagtcacaagtgaaggggctggtcttcaactccagaaagtgactgtgttaggagttgcaacagcaccacagcaggttctctctaatggggtaccagtgtctaacttcacatacagccctgacaccaaggtgctggacatctgtgtgtctttattgatgggtgaacagttcctggtgtcttggtgc

SEQ ID NO: 653 - DNA, 2649 bp, synthetic construct
  source 1..2649: mol_type = other DNA
gcacaccctggcaggcccagagcagtgcccacacagtgtgatgtcccaccaaatagcaggtttgattgtgcccctgacaaggctattacccaggaacagtgtgaagccagaggctgttgctacatccctgcaaaacaggggttgcagggagcacagatggggcagccctggtgcttcttcccaccatcttacccaagctataagttagaaaatctgtcatcctctgaaatgggctacactgccaccttgacaaggaccacccccacattcttccccaaagacatcctgacccttaggctggatgtgatgatggagactgagaacaggctccactttactatcaaagatccagctaacaggaggtatgaggtgcccttggagactcctcatgtccattcaagggcaccttccccactctactcagtggagttttcagaggagccctttggggttattgtgaggagacagctggatggcagagtgctgctgaacactactgtggcccctctgttctttgctgaccagttccttcagctgtcaacttctctgccatcacagtatatcacaggcctagctgagcacctcagtcccctgatgctcagcaccagctggacaagaattactctttggaacagagaccttgcacccactccaggtgctaatctctatgggtctcaccctttctacctggccctagaggatgggggctcagcacatggggtgttcttgctaaatagcaatgccatggatgtggtcttacagccttctcctgcccttagctggaggtctacaggtggaatactggatgtctacatctttctgggcccagagcccaagtctgttgtgcagcaatacctggatgttgtaggatatccctttatgccaccatattggggactgggcttccatttatgcaggtggggctactcctccactgctattaccaggcaagtggttgaaaacatgacaagggcccactttcccctggatgtacagtggaatgatcttgattacatggactccaggagggactttacatttaataaagatggcttcagggatttccctgccatggtgcaggagctgcaccagggaggcaggaggtacatgatgatagtggatcctgccatcagcagctcaggccctgctgggtcatataggccttatgatgaaggtcttaggaggggggtttttattaccaatgaaactggccaaccacttattggcaaggtatggcctggttcaactgccttccctgacttcaccaaccccacagccctggcctggtgggaggatatggtggctgaatttcatgaccaggttccttttgatggcatgtggattgatatgaatgagccttccaactttatcaggggctctgaagatggctgccccaataatgagctggagaacccaccctatgttcctggggtggttgggggtaccctccaggctgccactatctgtgcctccagccatcagtttctctccacacactacaacttgcacaacctctatggcctgactgaagccattgcctctcatagggctttggttaaggctagggggacaagaccatttgtgatctccaggtcaacttttgctggccatggcaggtatgctggccattggactggtgatgtgtggagctcctgggagcaactagcttcatcagtgccagaaatcctgcagtttaatctgctaggggttcctctggttggtgctgatgtctgtggctttttgggcaacacctcagaggaactatgtgtgaggtggacccagctgggagccttctaccccttcatgaggaaccataacagcctgctcagtctgccccaggagccttactcattctcagagcctgcccagcaggctatgaggaaggccctcaccctgaggtatgcactcctcccccacctctacacactgttccaccaagcccatgtagctggggaaactgttgccaggcccctctttctggaattccccaaggactctagcacctggactgtggatcatcaactcctttggggggaagcccttctcatcacaccagtgctccaggctgggaaagctgaagtgactggctatttccccttgggcacatggtatgacctgcagactgtgccagtagaggcccttggctctttaccacccccacctgcagctccaagggaaccagcaatccactctgagggtcagtgggtgactttgcctgcccccttagacacaataaatgtccacctcagagctgggtacatcattcccctgcagggtcctggcctcacaaccacagagtccaggcaacagcccatggctctggctgtggccctgacaaagggtggggaggccaggggggagcttttctgggatgatggagagagcctggaagtgctggagaggggggcctacacacaggtcatattcctggctaggaataacactatagtgaatgaattggtaagggtgaccagtgagggagctggcttgcagctgcagaaggtgactgtcctgggggtggccactgcaccccagcaggtcctttccaatggtgtccctgtctccaacttcacttacagccctgacaccaaggtcttggacatttgtgtttcattattgatgggagagcagtttctagtgagctggtgt

SEQ ID NO: 654 - DNA, 2649 bp, synthetic construct
  source 1..2649: mol_type = other DNA
gcccaccctggcaggcctagagctgtgcctacacaatgtgatgtgccacctaacagcagatttgactgtgcacctgacaaggccataacccaggaacagtgtgaggctagagggtgctgctacatccctgctaagcagggactgcaaggagctcagatgggtcagccctggtgcttctttcccccatcctaccctagttacaaactagaaaatctgagcagttctgagatgggctacacagccaccctgactagaaccactccaaccttcttcccaaaggacatcttaactctcagactggatgtaatgatggaaactgagaatagattgcacttcactatcaaagacccagccaacagaagatatgaagttcctctagaaacacctcatgtgcactctagagccccttcccctctgtacagtgtagagttctctgaagagccttttggggtgattgttagaaggcagttggatgggagggtgctgttgaacaccacagtggcccccctgttctttgctgaccagttccttcagctgagtacttctctcccaagtcagtatatcacaggtctggctgagcacctgtcccctctcatgctgtctaccagctggacaagaataaccctatggaacagagacctggcaccaacccctggagcaaacttgtatggcagccaccccttctaccttgccctggaggatggtggcagtgcacatggggtgttcctcctcaactccaatgccatggatgtggttctgcaaccctctcctgccctcagctggagaagcacaggaggcattctagatgtctacatcttcctgggccctgaaccaaagtctgtggtccaacaatacctggatgttgtgggatacccctttatgcccccttactggggattaggcttccacctgtgcagatggggttactcaagcacagcaattaccagacaggtggttgagaacatgaccagggctcacttccctttagatgtgcagtggaatgacctggactacatggacagcagaagggactttaccttcaacaaagatggattcagggacttccctgccatggtacaggagctacaccaaggaggcagaagatacatgatgattgttgacccagcaatttcttcctctggcccagcaggcagctacagaccctatgatgagggcctgagaagaggggtgttcatcacaaatgagacaggccaacctctgataggcaaagtgtggcctgggtccactgccttcccagacttcacaaaccccactgcactggcatggtgggaagacatggtggctgagttccatgaccaggtgccttttgatgggatgtggattgatatgaatgagccctctaactttatcagaggaagtgaggatggctgccccaacaatgaacttgagaaccctccttatgttcctggagtggtaggaggcactttgcaggcagccaccatctgtgccagctcacaccagttcctgtccactcactacaacctgcacaacctatatggacttacagaggccatagcttctcacagagccttagtgaaggccagaggcactaggccttttgtcatcagcaggtcaacctttgcaggccatggcagatatgctggccactggactggggatgtttggagttcttgggaacaactggccagctcagtgccagagatcctgcagtttaacctgctgggggtgcctctggtgggagctgatgtatgtggtttcctgggtaacacctctgaggagctctgtgtaagatggacccagttgggagctttctaccctttcatgagaaaccacaactctctcctcagcttgccccaggagccctacagcttttctgaaccagcccagcaggctatgaggaaggcactgacactgagatatgctctactgcctcacctctacaccctattccaccaagcccatgtggcaggtgaaacagtggccaggcccctgttcttagagttccctaaggactcaagtacctggacagttgaccaccagctgttgtggggtgaggccctgctcatcaccccagtactccaggctggaaaggcagaggttactggctacttccctctgggcacctggtatgacctgcagacagtccctgtggaggctctggggtcactgcctccccctccagctgctccaagagaacctgccatccacagtgaaggccaatgggtaaccttgcctgcccctttagacacaatcaatgtgcacttgagagcaggctatatcataccactgcaaggaccaggcctaacaactacagagagcagacagcaacctatggctctggcagttgctttgactaagggtggtgaagcaagaggggaactgttctgggatgatggagaatctctggaagtgttagagagaggagcatacactcaggtgatcttcttagccaggaacaacaccattgtgaatgaactggttagggtgacaagtgaaggtgcaggactgcagctgcagaaggtgactgtcttaggtgtagccacagctccacaacaagtgctgtccaatggtgttcctgtcagcaacttcacctactctcctgacaccaaggttctggacatctgtgtgagcctccttatgggtgagcagtttctagtctcttggtgc

SEQ ID NO: 655 - DNA, 2649 bp, synthetic construct
  source 1..2649: mol_type = other DNA
gcacatccaggcaggcccagagcagtgcccacacaatgtgatgtcccccctaattcaaggtttgattgtgcccctgacaaggccatcactcaggaacagtgtgaagctaggggctgttgctatatccctgcaaagcagggtctgcagggagctcagatggggcagccctggtgcttctttccacccagctaccccagctacaaactggagaatctgagctcatctgaaatgggctacactgccaccctgaccaggacaacccccaccttcttccccaaagacatattgactcttagacttgatgtgatgatggagactgaaaacaggttacatttcactattaaagatccagctaacaggaggtatgaggttcccttggagactccacatgttcacagcagggcaccttccccactttactctgtggagttcagtgaagagccctttggtgtgattgtgaggaggcagctggatggcagggtactgttgaacactactgtggctcccttgttctttgctgaccagttccttcagctgtccaccagcctgccctcccagtatatcacaggcttagctgagcacctcagtcccctgatgttgagcacatcatggaccaggattaccctttggaacagggatcttgctcccactcctggtgctaacctctatgggtctcaccctttctatctggctttggaggatggtgggagtgcacatggggtgttcctgctaaatagcaatgccatggatgtggtcctacagcctagccctgccctttcttggaggtctacaggtgggatattagatgtttacatttttctgggaccagaacctaagtcagtagtgcagcagtacctagatgttgtgggatatccttttatgcctccatactggggattaggctttcatctgtgcaggtggggctattcctcaactgctattaccaggcaggtggtggagaacatgaccagagcccattttcccttagatgtccagtggaatgatctggactatatggactccaggagggactttacattcaacaaggatggcttcagggattttcctgccatggtgcaggaactccaccagggtggtaggaggtatatgatgatagttgatcctgctatcagcagcagtggccctgctgggagctacaggccatatgatgagggtctgaggaggggtgttttcataacaaatgagactggccagcctcttattgggaaagtatggcctggttccactgccttccctgatttcaccaatcctacagccctggcctggtgggaggacatggtggctgagttccatgaccaggtgccttttgatggcatgtggattgacatgaatgaaccttccaacttcatcaggggctctgaggatggctgccctaacaatgagctggagaacccaccctatgtgcctggggtggttggggggacactccaggctgctactatatgtgcctccagccaccagtttctctctacacactacaatctgcacaacctctatggcctgactgaagcaattgcctcccacagggctctggtgaaggctagggggacaaggccatttgtgatatccagatccacctttgctggacatggcaggtatgcaggccactggactggggatgtgtggagctcctgggagcagttggcctctagtgtgccagaaattctgcagtttaatctgctgggggttcctctagtaggggctgatgtctgtggctttcttggcaacacctcagaggaactgtgtgtgaggtggactcagctgggggctttctacccctttatgagaaaccacaattcactgctcagtctgccccaggagccatattctttcagtgagcctgcccaacaagccatgaggaaggccctcaccctgaggtatgcacttctcccacacctctatacactgtttcatcaggcccatgttgctggggaaactgttgcaaggcccctcttcctggagttccccaaagactctagcacctggactgtggatcatcaactcctttggggtgaggccttactcatcaccccagtgctccaagctgggaaggcagaagtgactggctacttccccttgggcacatggtatgatttgcagactgtgccagtagaagcccttggcagccttccacccccacctgcagctcctagggagccagccatccatagtgagggtcagtgggtgactctgccagcccccctggacactatcaatgtccacctcagggctgggtacattatccctctgcaaggccctggcctcacaaccacagaatccagacagcaacccatggccctagctgttgccttgaccaagggtggggaagccaggggtgagctcttttgggatgatggagagagcctggaagtgctggagaggggggcctacacacaggtcattttcctagccagaaataacactattgtgaatgaattggtaagggtgaccagtgagggagctggcctgcagctgcagaaggtgactgtccttggtgtggctactgctccacagcaggtcctctccaatggtgtccctgtctcaaattttacctattctccagacaccaaggtcttggacatctgtgtatccctgttgatgggagagcagtttttggttagctggtgt

SEQ ID NO: 656 - DNA, 2649 bp, synthetic construct
  source 1..2649: mol_type = other DNA
gcacaccctggcagacctagagctgttcccacacagtgtgatgtccctcctaacagcagatttgactgtgccccagacaaagctatcacccaggagcagtgtgaggctaggggctgctgctacatccctgccaagcagggcctgcaaggagcccaaatgggccagccctggtgtttctttcccccctcttacccatcctacaagctagaaaacctcagctcatctgagatgggatacacagctaccctgaccagaaccacccccaccttcttccctaaggatatactgacattgagactggatgtgatgatggaaactgagaacagactccacttcaccatcaaggatcctgctaacagaaggtatgaggtgcccctggagacacctcatgtccacagtagagcccctagcccactatactctgtggagttctcagaagagccttttggtgtgatagttagaagacaactggatgggagagtgttgctaaatactactgttgctcccttattttttgctgaccagttcttgcagttatccacctctctcccctctcagtacatcacagggctggctgagcacctttcccctctgatgttgtccacttcttggacaagaatcaccttgtggaatagggaccttgccccaactcctggtgccaacctgtatggcagccaccccttctacctggccctggaggatggaggctctgcccatggagtgttcctgctgaactccaatgccatggatgttgtgctgcagccatctcctgccctgtcctggaggagtacaggaggcatcctggatgtgtatatctttctgggacctgagcccaagtctgtggttcagcagtacctggatgtagtgggctaccccttcatgccaccttactggggtctgggcttccacctctgcaggtggggttacagtagcactgctatcactagacaagtggtggagaacatgaccagggcccacttccctctagatgtgcagtggaatgacttagactatatggatagcagaagggacttcacattcaacaaggatggcttcagggacttccctgcaatggtacaggagttacaccaggggggaagaagatacatgatgattgtggaccctgccattagctcttctggccctgcagggagctacaggccttatgatgaagggctgagaaggggtgtgttcattactaatgaaacaggccagcctttaattggcaaggtctggcctggcagtacagccttcccagacttcaccaaccctactgctctagcttggtgggaggacatggtggctgaatttcatgatcaagtgccttttgatggcatgtggattgacatgaatgagcctagcaacttcattagaggcagtgaagatggttgccctaacaatgagctggaaaatccaccctatgttccaggtgtggtaggaggcaccctacaagcagccaccatttgtgcctctagccaccagttcctgagcacccactataacttacataacctgtatggcctcacagaagccattgccagccacagagccttagtgaaagcaaggggcacaagaccctttgtaatctcaaggtccacctttgctggccatggcagatatgcaggccactggacaggtgatgtgtggagctcctgggagcagttagcctcttctgtgccagaaatcctgcagttcaatctcctgggagtgcctctggtgggagctgatgtttgtggctttctgggtaacacaagtgaagagctgtgtgtcaggtggacacagctgggagcattttaccccttcatgaggaaccacaactctttgctcagtctgcctcaagaaccctactccttctctgagcctgcccagcaggctatgagaaaggccctcacccttagatatgctctcctgcctcacctgtacaccctgttccaccaggcccatgttgctggggagactgtggctagaccacttttcttagagttccctaaggacagcagtacctggacagtagaccaccaactgttatggggggaggccctgctcattacccctgttctccaggcaggcaaggcagaagtgacagggtacttccctctgggcacctggtatgacctacagacagttcctgtggaggcccttggcagtctgccaccccctcctgctgcacctagagaacctgcaatccactcagaaggacaatgggttaccctccctgcccctctagacaccatcaatgtgcatttaagagcaggctacatcatacccttgcagggccctggcctgaccaccacagaatctagacagcagcccatggcactggctgttgccctaaccaagggaggagaggccagaggagagctgttctgggatgatggggagagtctggaggtcctggagagaggagcctacacccaggtgatctttcttgctagaaacaatactatagtgaatgagctagtgagagtgactagtgagggtgctggcctccagttgcagaaggtaacagtattaggagtggctacagcccctcagcaggtactgtccaatggtgtgcctgtttccaatttcacttactcccctgacactaaggtactggatatctgtgtgtccctgctgatgggagaacagtttctggtcagctggtgc

SEQ ID NO: 657 - DNA, 2649 bp, synthetic construct
  source 1..2649: mol_type = other DNA
gcacatcctggaaggcccagagcagtgcccacacagtgtgatgtcccccccaattctagatttgattgtgcccctgataaggctatcacccaagaacagtgtgaggccagaggctgttgctacatacctgcaaagcaagggcttcagggagctcagatggggcaaccctggtgctttttcccacctagctatcccagctacaagctggaaaacttgagctcctctgaaatgggctacactgccactctgaccaggaccacccccaccttcttccccaaagacatactgactcttagactagatgttatgatggagactgaaaataggctccattttacaatcaaagatccagctaacaggaggtatgaggttcctttggagacccctcatgtccatagcagagcaccatcaccactctactctgtggagttttctgaggaaccctttggggtgattgtgaggaggcagctagatggcagggtgctgttaaatacaactgtggctcccctgttctttgctgaccagtttcttcaactgtccacctccctgccctcccagtatattacaggcctggctgagcacctcagtcccttgatgctcagcaccagctggaccaggataaccttatggaacagggaccttgctccaactcctggtgcaaacctctatgggtctcatcctttctatctagctcttgaggatggggggtctgcacatggggtgttcctgctaaactctaatgcaatggatgttgtcctgcagccaagccctgccctttcttggaggtccacaggtgggatcctggatgtctacatcttcttgggcccagaacccaagtctgtggtgcagcagtaccttgatgttgtgggatacccttttatgcccccatactggggcctgggctttcatctgtgcaggtggggctactcctccactgctatcaccaggcaggtggtggagaacatgaccagggcccacttccctctggatgtccagtggaatgatctggattatatggattccaggagggatttcactttcaacaaagatggctttagggacttccctgccatggtgcaggagctgcaccagggtggcaggaggtatatgatgattgtggatcctgccataagcagctcaggccctgctgggagctacaggccatatgatgaaggtttgaggaggggggttttcataaccaatgagactggccagcctctgattgggaaggtatggcctgggtccactgcattccctgacttcaccaatcccacagctctggcctggtgggaggacatggtagctgagttccatgaccaggtgccctttgatggaatgtggattgacatgaatgaaccttccaacttcatcaggggctctgaggatggctgccccaacaatgagctggaaaacccaccctatgtgcctggggtggttggtgggaccttgcaagctgccaccatctgtgcctcctctcaccagtttctctccacacattacaatctgcacaatctctatggcctgactgaagccattgcttcccacagagctctggtgaaggctaggggcacaaggccatttgttatatcaaggtccacatttgctggccatggcaggtatgctggccactggacaggggatgtatggagctcctgggagcagcttgcatcctctgtgccagaaattctgcagtttaacttattaggggtgcctctggttggtgctgatgtctgtggcttccttggcaacacatcagaggagctttgtgtgaggtggactcagttaggggctttctacccattcatgaggaatcacaactcactcctcagtctaccccaggagccctattcattctctgagccagcccagcaggccatgaggaaggctctcaccctgaggtatgcactcctccctcatttgtacacactgtttcaccaggcccatgttgctggggaaactgttgccaggcccctcttcctggaattccccaaagactctagcacttggactgtggatcatcagctcctgtggggggaagccctgctcattactccagtgctacaggctggtaaggctgaagtgactggctacttccctttgggcacatggtatgacctgcagacagtgccagtagaggcccttggcagcctcccacctccacctgcagctcccagggagccagccatccactctgaaggacagtgggtgactctgcctgcccccttagacactattaatgttcacctcagggctggctacatcattcccctgcaaggccctggcctcacaaccacagaatccaggcagcaacccatggctttggctgtggccctgactaagggtggggaagccaggggggagcttttttgggatgatggagagagcctagaagtgttggagaggggggcctatacacaggtcatctttttggccaggaataatacaattgtgaatgagctggtaagggtgaccagtgaaggagctggactgcagctgcagaaggtgactgtacttggagtggctactgctccacagcaggttctatcaaatggtgtccctgtttccaatttcacctacagcccagacacaaaggtcctggacatttgtgtctccctgttgatgggagagcaatttttggtaagctggtgt

SEQ ID NO: 658 - DNA, 2649 bp, synthetic construct
  source 1..2649: mol_type = other DNA
gcccaccctggcagacctagagctgtgccaactcagtgtgatgtccctcctaactctagatttgattgtgctccagacaaggccatcacccaggagcagtgtgaagctaggggctgctgctacatccctgccaagcaaggtctgcagggtgcccagatgggtcagccttggtgcttcttcccaccttcctacccctcatacaagctggaaaatctgagctcttctgagatgggctacacagccaccttgacaaggaccactccaacctttttccctaaagacatcctgacactgagacttgatgtgatgatggagactgagaacagactgcacttcactatcaaagacccagcaaacagaaggtatgaagtgcctctggagaccccccatgtgcacagcagagctccttcacctctgtactcagtggagttcagtgaggagccatttggggtgattgtgaggagacagctggatggcagggtactgctgaacaccacagtggcacccttgttctttgcagaccaattcctccagctcagtacaagcctgccttctcagtacattacaggactggcagagcacttaagcccattgatgttatccaccagctggaccagaattaccttgtggaacagggacctggcccctaccccaggagctaacctctatggcagccacccattttacctagccctggaggatgggggatcagcacatggggttttcctgctaaacagcaatgccatggatgtggtcctgcagccttctcctgccctgagctggaggtccacaggagggatccttgatgtgtacatctttctgggccctgagcctaagagtgtggtgcaacagtacttggatgtggtggggtaccctttcatgcctccctactgggggttgggcttccacttgtgcagatggggatacagctcaacagccatcaccaggcaggtggttgagaacatgactagagcccactttccactagatgtgcagtggaatgacctggactacatggatagtagaagagacttcaccttcaataaggatggcttcagagatttccctgccatggtgcaggaactgcaccagggaggcagaagatacatgatgatagtggaccctgctatcagcagctctggccctgcaggtagctacagaccttatgatgagggcctgaggaggggagtgttcatcaccaatgagacaggccagcccctcattggcaaggtctggccaggcagcacagctttccctgacttcaccaaccccacagccctggcctggtgggaggacatggtggctgagttccatgaccaggtaccctttgatgggatgtggattgacatgaatgaaccctctaacttcatcaggggttctgaagatggctgccctaacaatgagctggagaaccccccttatgtgccaggagttgtgggaggcacccttcaggctgccaccatctgtgccagttcccaccagttcctaagcacccactacaacctgcacaacctgtatggtctcactgaagccatagcctctcacagagctctagtgaaggccagagggaccaggccttttgttatctccaggagtacctttgctggccatggtagatatgcaggccactggacaggagatgtgtggtcctcctgggagcaattagccagcagtgtgccagagatcctgcagttcaacctgctgggggttcctttagttggggcagatgtgtgtggcttcttgggcaacacatctgaagagctgtgtgtgagatggacccagctgggagccttctacccattcatgagaaaccataactcactgctgagcctccctcaggagccctacagcttctcagaacctgcccagcaggctatgaggaaggccctgacactcaggtatgccctgttacctcacctgtacaccctgttccaccaggctcatgtagctggggagactgtggccagaccccttttccttgagtttcctaaggacagctccacctggactgtggaccaccagttgctgtggggagaggccctgctgatcacccctgttctgcaggctggcaaagctgaggtgacaggctacttccccctgggaacctggtatgacctacaaactgtgccagtggaagcactgggctcactacctccacctccagctgcccccagagaacctgctattcactctgaagggcagtgggtgacactgcctgccccattagacaccatcaatgtacacttaagggctggctacatcattccactgcaggggccaggcctgaccaccactgagtccaggcagcagcccatggccctggcagtagccctaaccaagggaggtgaggccagaggagagctgttttgggatgatggtgaaagcctagaggtactagagagaggagcctacacccaggtcatcttcctggccagaaacaacacaatagtgaatgagctggtcagggtcacatctgagggggcaggcctgcagcttcagaaggtcactgtgttgggggtagccacagctccacagcaggtactttccaatggagtgccagtcagcaacttcacctacagtcctgacacaaaggttctggacatctgtgtgagcctgctgatgggagagcagttcttggtcagctggtgc

SEQ ID NO: 659 - DNA, 3417 bp, synthetic construct
  source 1..3417: mol_type = other DNA
gacatccagatgacccagtctccatcttccgtgtctgcatctgtaggagacagagtcaccatcacttgtcgggcgagtcagggtattgccagctggttagcctggtatcagcagaaaccagggaaagcccctgagctcctgatctatgctgcatccagtttgcaaggtggggtcccatcaaggttcagcggcagtggatctgggacagatttcactctcaccatcagcagcctgcagcctgaagattttgcaatttactattgtcaacaggctaactatttcccgtggacgttcggccaagggaccaaggtggaaatcaaaggcggcggcggaagcggagggggaggatcaggaggaggcggatcccagatcaccttgaaggagtctggtcctacgctggtgaaacccacacagaccctcacgctgacctgcaccttctctgggttctcactcagcactagtggagtgggtgtggtctggatccgtcagccccccggaaaggccctggagtggcttgcactcatttattggaatgatcataagcggtacagcccatctctggggagcaggctcaccatcaccaaggacacctccaaaaaccaggtggtccttacaatgaccaacatggaccctgtggacacagccacatattactgtgcacactacagtgggagctattcctactactactatggtttggacgtctggggccaagggaccacggtcaccgtctcctcaggaggtggtggaagtggaggtggtggaagtgcacaccccggccgtcccagagcagtgcccacacagtgcgacgtcccccccaacagccgcttcgattgcgcccctgacaaggccatcacccaggaacagtgcgaggcccgcggctgttgctacatccctgcaaagcaggggctgcagggagcccagatggggcagccctggtgcttcttcccacccagctaccccagctacaagctggagaacctgagctcctctgaaatgggctacacggccaccctgacccgtaccacccccaccttcttccccaaggacatcctgaccctgcggctggacgtgatgatggagactgagaaccgcctccacttcacgatcaaagatccagctaacaggcgctacgaggtgcccttggagaccccgcatgtccacagccgggcaccgtccccactctacagcgtggagttctccgaggagcccttcggggtgatcgtgcgccggcagctggacggccgcgtgctgctgaacacgacggtggcgcccctgttctttgcggaccagttccttcagctgtccacctcgctgccctcgcagtatatcacaggcctcgccgagcacctcagtcccctgatgctcagcaccagctggaccaggatcaccctgtggaaccgggaccttgcgcccacgcccggtgcgaacctctacgggtctcaccctttctacctggcgctggaggacggcgggtcggcacacggggtgttcctgctaaacagcaatgccatggatgtggtcctgcagccgagccctgcccttagctggaggtcgacaggtgggatcctggatgtctacatcttcctgggcccagagcccaagagcgtggtgcagcagtacctggacgttgtgggatacccgttcatgccgccatactggggcctgggcttccacctgtgccgctggggctactcctccaccgctatcacccgccaggtggtggagaacatgaccagggcccacttccccctggacgtccagtggaacgacctggactacatggactcccggagggacttcacgttcaacaaggatggcttccgggacttcccggccatggtgcaggagctgcaccagggcggccggcgctacatgatgatcgtggatcctgccatcagcagctcgggccctgccgggagctacaggccctacgacgagggtctgcggaggggggttttcatcaccaacgagaccggccagccgctgattgggaaggtatggcccgggtccactgccttccccgacttcaccaaccccacagccctggcctggtgggaggacatggtggctgagttccatgaccaggtgcccttcgacggcatgtggattgacatgaacgagccttccaacttcatcaggggctctgaggacggctgccccaacaatgagctggagaacccaccctacgtgcctggggtggttggggggaccctccaggcggccaccatctgtgcctccagccaccagtttctctccacacactacaacctgcacaacctctacggcctgaccgaagccatcgcctcccacagggcgctggtgaaggctcgggggacacgcccatttgtgatctcccgctcgacctttgctggccacggccgatacgccggccactggacgggggacgtgtggagctcctgggagcagctcgcctcctccgtgccagaaatcctgcagtttaacctgctgggggtgcctctggtcggggccgacgtctgcggcttcctgggcaacacctcagaggagctgtgtgtgcgctggacccagctgggggccttctaccccttcatgcggaaccacaacagcctgctcagtctgccccaggagccgtacagcttcagcgagccggcccagcaggccatgaggaaggccctcaccctgcgctacgcactcctcccccacctctacacactgttccaccaggcccacgtcgcgggggagaccgtggcccggcccctcttcctggagttccccaaggactctagcacctggactgtggaccaccagctcctgtggggggaggccctgctcatcaccccagtgctccaggccgggaaggccgaagtgactggctacttccccttgggcacatggtacgacctgcagacggtgccagtagaggcccttggcagcctcccacccccacctgcagctccccgtgagccagccatccacagcgaggggcagtgggtgacgctgccggcccccctggacaccatcaacgtccacctccgggctgggtacatcatccccctgcagggccctggcctcacaaccacagagtcccgccagcagcccatggccctggctgtggccctgaccaagggtggggaggcccgaggggagctgttctgggacgatggagagagcctggaagtgctggagcgaggggcctacacacaggtcatcttcctggccaggaataacacgatcgtgaatgagctggtacgtgtgaccagtgagggagctggcctgcagctgcagaaggtgactgtcctgggcgtggccacggcgccccagcaggtcctctccaacggtgtccctgtctccaacttcacctacagccccgacaccaaggtcctggacatctgtgtctcgctgttgatgggagagcagtttctcgtcagctggtgt

SEQ ID NO: 660 - DNA, 3426 bp, synthetic construct
  source 1..3426: mol_type = other DNA
gacatccagatgacccagtctccatcctccctgtctgcatctgtaggagacagagtcaccatcacttgccgggcaagtcagagcattagcagctatttaaattggtatcagcagaaaccagggaaagcccctaagctcctgatctatgctgcatccagtttgcaaagtggggtcccgtcaaggttcagtggcagtggatctgggacagatttcactctcaccatcagcagtctgcaacctgaagattttgcaacttactactgtcaacagagttacagtacccctccgatcaccttcggccaagggacacgactggagattaaaggcggcggcggaagcggagggggaggatcaggaggaggcggatcccaggtgcagctggtggagtctgggggaggcgtggtccagcctggaaggtccctgagactctcctgcgcagcctctggattcccctttagtaattatgtcatgtattgggtccgccaggctccaggcaaggggctggagtgggtggctcttattttttttgacggaaagaaaaactatcatgcagactccgtgaagggccgattcaccataaccagagacaattccaaaaatatgttatatctgcaaatgaacagcctgagacctgaggacgcggctgtgtattactgtgcgaaaatccattgtcctaatggtgtatgttacaaggggtattacggaatggacgtctggggccaagggaccacggtcaccgtctcctcaggaggtggtggaagtggaggtggtggaagtgcacaccccggccgtcccagagcagtgcccacacagtgcgacgtcccccccaacagccgcttcgattgcgcccctgacaaggccatcacccaggaacagtgcgaggcccgcggctgttgctacatccctgcaaagcaggggctgcagggagcccagatggggcagccctggtgcttcttcccacccagctaccccagctacaagctggagaacctgagctcctctgaaatgggctacacggccaccctgacccgtaccacccccaccttcttccccaaggacatcctgaccctgcggctggacgtgatgatggagactgagaaccgcctccacttcacgatcaaagatccagctaacaggcgctacgaggtgcccttggagaccccgcatgtccacagccgggcaccgtccccactctacagcgtggagttctccgaggagcccttcggggtgatcgtgcgccggcagctggacggccgcgtgctgctgaacacgacggtggcgcccctgttctttgcggaccagttccttcagctgtccacctcgctgccctcgcagtatatcacaggcctcgccgagcacctcagtcccctgatgctcagcaccagctggaccaggatcaccctgtggaaccgggaccttgcgcccacgcccggtgcgaacctctacgggtctcaccctttctacctggcgctggaggacggcgggtcggcacacggggtgttcctgctaaacagcaatgccatggatgtggtcctgcagccgagccctgcccttagctggaggtcgacaggtgggatcctggatgtctacatcttcctgggcccagagcccaagagcgtggtgcagcagtacctggacgttgtgggatacccgttcatgccgccatactggggcctgggcttccacctgtgccgctggggctactcctccaccgctatcacccgccaggtggtggagaacatgaccagggcccacttccccctggacgtccagtggaacgacctggactacatggactcccggagggacttcacgttcaacaaggatggcttccgggacttcccggccatggtgcaggagctgcaccagggcggccggcgctacatgatgatcgtggatcctgccatcagcagctcgggccctgccgggagctacaggccctacgacgagggtctgcggaggggggttttcatcaccaacgagaccggccagccgctgattgggaaggtatggcccgggtccactgccttccccgacttcaccaaccccacagccctggcctggtgggaggacatggtggctgagttccatgaccaggtgcccttcgacggcatgtggattgacatgaacgagccttccaacttcatcaggggctctgaggacggctgccccaacaatgagctggagaacccaccctacgtgcctggggtggttggggggaccctccaggcggccaccatctgtgcctccagccaccagtttctctccacacactacaacctgcacaacctctacggcctgaccgaagccatcgcctcccacagggcgctggtgaaggctcgggggacacgcccatttgtgatctcccgctcgacctttgctggccacggccgatacgccggccactggacgggggacgtgtggagctcctgggagcagctcgcctcctccgtgccagaaatcctgcagtttaacctgctgggggtgcctctggtcggggccgacgtctgcggcttcctgggcaacacctcagaggagctgtgtgtgcgctggacccagctgggggccttctaccccttcatgcggaaccacaacagcctgctcagtctgccccaggagccgtacagcttcagcgagccggcccagcaggccatgaggaaggccctcaccctgcgctacgcactcctcccccacctctacacactgttccaccaggcccacgtcgcgggggagaccgtggcccggcccctcttcctggagttccccaaggactctagcacctggactgtggaccaccagctcctgtggggggaggccctgctcatcaccccagtgctccaggccgggaaggccgaagtgactggctacttccccttgggcacatggtacgacctgcagacggtgccagtagaggcccttggcagcctcccacccccacctgcagctccccgtgagccagccatccacagcgaggggcagtgggtgacgctgccggcccccctggacaccatcaacgtccacctccgggctgggtacatcatccccctgcagggccctggcctcacaaccacagagtcccgccagcagcccatggccctggctgtggccctgaccaagggtggggaggcccgaggggagctgttctgggacgatggagagagcctggaagtgctggagcgaggggcctacacacaggtcatcttcctggccaggaataacacgatcgtgaatgagctggtacgtgtgaccagtgagggagctggcctgcagctgcagaaggtgactgtcctgggcgtggccacggcgccccagcaggtcctctccaacggtgtccctgtctccaacttcacctacagccccgacaccaaggtcctggacatctgtgtctcgctgttgatgggagagcagtttctcgtcagctggtgt

SEQ ID NO: 661 - DNA, 3405 bp, synthetic construct
  source 1..3405: mol_type = other DNA
gacatccagatgacccagtctccatcctccctgtctgcatctgtaggagacagagtcaccatcacttgccgggcaagtcagagcattagcagctatttaaattggtatcagcagaaaccagggaaagcccctaagctcctgatctatgctgcatccagtttgcaaagtggggtcccgtcaaggttcagtggcagtggatctgggacagatttcactctcaccatcagcagtctgcaacctgaagattttgcaacttactactgtcaacagagttacagtacccctccgatcaccttcggccaagggacacgactggagattaaaggcggcggcggaagcggagggggaggatcaggaggaggcggatccgaggtgcagctggtggagtctgggggaggcttagtacagcctggagggtccctaagactctcctgtgcagcctctggattcaccttcaatatttttgaaatgaactgggtccgccaggctccagggaaggggctggagtggatttcctacattagtagtcgtggaactaccacatactacgcagactctgtgaggggccgattcaccatctccagagacaacgccaagaactcactgtatctgcaaatgaacagcctgagagccgaggacacggctgtttattactgtgcgagagattatgaagcaacaatcccttttgacttctggggccagggaaccctggtcaccgtctcctcaggaggtggtggaagtggaggtggtggaagtgcacaccccggccgtcccagagcagtgcccacacagtgcgacgtcccccccaacagccgcttcgattgcgcccctgacaaggccatcacccaggaacagtgcgaggcccgcggctgttgctacatccctgcaaagcaggggctgcagggagcccagatggggcagccctggtgcttcttcccacccagctaccccagctacaagctggagaacctgagctcctctgaaatgggctacacggccaccctgacccgtaccacccccaccttcttccccaaggacatcctgaccctgcggctggacgtgatgatggagactgagaaccgcctccacttcacgatcaaagatccagctaacaggcgctacgaggtgcccttggagaccccgcatgtccacagccgggcaccgtccccactctacagcgtggagttctccgaggagcccttcggggtgatcgtgcgccggcagctggacggccgcgtgctgctgaacacgacggtggcgcccctgttctttgcggaccagttccttcagctgtccacctcgctgccctcgcagtatatcacaggcctcgccgagcacctcagtcccctgatgctcagcaccagctggaccaggatcaccctgtggaaccgggaccttgcgcccacgcccggtgcgaacctctacgggtctcaccctttctacctggcgctggaggacggcgggtcggcacacggggtgttcctgctaaacagcaatgccatggatgtggtcctgcagccgagccctgcccttagctggaggtcgacaggtgggatcctggatgtctacatcttcctgggcccagagcccaagagcgtggtgcagcagtacctggacgttgtgggatacccgttcatgccgccatactggggcctgggcttccacctgtgccgctggggctactcctccaccgctatcacccgccaggtggtggagaacatgaccagggcccacttccccctggacgtccagtggaacgacctggactacatggactcccggagggacttcacgttcaacaaggatggcttccgggacttcccggccatggtgcaggagctgcaccagggcggccggcgctacatgatgatcgtggatcctgccatcagcagctcgggccctgccgggagctacaggccctacgacgagggtctgcggaggggggttttcatcaccaacgagaccggccagccgctgattgggaaggtatggcccgggtccactgccttccccgacttcaccaaccccacagccctggcctggtgggaggacatggtggctgagttccatgaccaggtgcccttcgacggcatgtggattgacatgaacgagccttccaacttcatcaggggctctgaggacggctgccccaacaatgagctggagaacccaccctacgtgcctggggtggttggggggaccctccaggcggccaccatctgtgcctccagccaccagtttctctccacacactacaacctgcacaacctctacggcctgaccgaagccatcgcctcccacagggcgctggtgaaggctcgggggacacgcccatttgtgatctcccgctcgacctttgctggccacggccgatacgccggccactggacgggggacgtgtggagctcctgggagcagctcgcctcctccgtgccagaaatcctgcagtttaacctgctgggggtgcctctggtcggggccgacgtctgcggcttcctgggcaacacctcagaggagctgtgtgtgcgctggacccagctgggggccttctaccccttcatgcggaaccacaacagcctgctcagtctgccccaggagccgtacagcttcagcgagccggcccagcaggccatgaggaaggccctcaccctgcgctacgcactcctcccccacctctacacactgttccaccaggcccacgtcgcgggggagaccgtggcccggcccctcttcctggagttccccaaggactctagcacctggactgtggaccaccagctcctgtggggggaggccctgctcatcaccccagtgctccaggccgggaaggccgaagtgactggctacttccccttgggcacatggtacgacctgcagacggtgccagtagaggcccttggcagcctcccacccccacctgcagctccccgtgagccagccatccacagcgaggggcagtgggtgacgctgccggcccccctggacaccatcaacgtccacctccgggctgggtacatcatccccctgcagggccctggcctcacaaccacagagtcccgccagcagcccatggccctggctgtggccctgaccaagggtggggaggcccgaggggagctgttctgggacgatggagagagcctggaagtgctggagcgaggggcctacacacaggtcatcttcctggccaggaataacacgatcgtgaatgagctggtacgtgtgaccagtgagggagctggcctgcagctgcagaaggtgactgtcctgggcgtggccacggcgccccagcaggtcctctccaacggtgtccctgtctccaacttcacctacagccccgacaccaaggtcctggacatctgtgtctcgctgttgatgggagagcagtttctcgtcagctggtgt

SEQ ID NO: 662 - DNA, 3411 bp, synthetic construct
  source 1..3411: mol_type = other DNA
gacatccagatgacccagtctccatcctccctgtctgcatctgtaggagacagagtcaccatcacttgccgggcaagtcagagcattagcagctatttaaattggtatcagcagaaaccagggaaagcccctaagctcctgatctatgctgcatccagtttgcaaagtggggtcccgtcaaggttcagtggcagtggatctgggacagatttcactctcaccatcagcagtctgcaacctgaagattttgcaacttactactgtcaacagagttacagtacccctccgatcaccttcggccaagggacacgactggagattaaaggcggcggcggaagcggagggggaggatcaggaggaggcggatccgaagtgcagctggtggagtctgggggaggcttggttcagcctggcaggtccctgagactctcctgtgcagcctctggattcacctttgatgattatgccatgaactgggtccggcaagctccagggaagggcctggagtgggtctcaggtattagttggagtagtggtagcatggactatgcggactctgtgaagggccgattcaccatctccagagacaacgccaaaaactccctgtatctgcaaatgaacagtctgagaactgaggacacggccttatattactgtgcaaaagctagggaagttggagactactacggtatggacgtctggggccaagggaccacggtcaccgtctcctcaggaggtggtggaagtggaggtggtggaagtgcacaccccggccgtcccagagcagtgcccacacagtgcgacgtcccccccaacagccgcttcgattgcgcccctgacaaggccatcacccaggaacagtgcgaggcccgcggctgttgctacatccctgcaaagcaggggctgcagggagcccagatggggcagccctggtgcttcttcccacccagctaccccagctacaagctggagaacctgagctcctctgaaatgggctacacggccaccctgacccgtaccacccccaccttcttccccaaggacatcctgaccctgcggctggacgtgatgatggagactgagaaccgcctccacttcacgatcaaagatccagctaacaggcgctacgaggtgcccttggagaccccgcatgtccacagccgggcaccgtccccactctacagcgtggagttctccgaggagcccttcggggtgatcgtgcgccggcagctggacggccgcgtgctgctgaacacgacggtggcgcccctgttctttgcggaccagttccttcagctgtccacctcgctgccctcgcagtatatcacaggcctcgccgagcacctcagtcccctgatgctcagcaccagctggaccaggatcaccctgtggaaccgggaccttgcgcccacgcccggtgcgaacctctacgggtctcaccctttctacctggcgctggaggacggcgggtcggcacacggggtgttcctgctaaacagcaatgccatggatgtggtcctgcagccgagccctgcccttagctggaggtcgacaggtgggatcctggatgtctacatcttcctgggcccagagcccaagagcgtggtgcagcagtacctggacgttgtgggatacccgttcatgccgccatactggggcctgggcttccacctgtgccgctggggctactcctccaccgctatcacccgccaggtggtggagaacatgaccagggcccacttccccctggacgtccagtggaacgacctggactacatggactcccggagggacttcacgttcaacaaggatggcttccgggacttcccggccatggtgcaggagctgcaccagggcggccggcgctacatgatgatcgtggatcctgccatcagcagctcgggccctgccgggagctacaggccctacgacgagggtctgcggaggggggttttcatcaccaacgagaccggccagccgctgattgggaaggtatggcccgggtccactgccttccccgacttcaccaaccccacagccctggcctggtgggaggacatggtggctgagttccatgaccaggtgcccttcgacggcatgtggattgacatgaacgagccttccaacttcatcaggggctctgaggacggctgccccaacaatgagctggagaacccaccctacgtgcctggggtggttggggggaccctccaggcggccaccatctgtgcctccagccaccagtttctctccacacactacaacctgcacaacctctacggcctgaccgaagccatcgcctcccacagggcgctggtgaaggctcgggggacacgcccatttgtgatctcccgctcgacctttgctggccacggccgatacgccggccactggacgggggacgtgtggagctcctgggagcagctcgcctcctccgtgccagaaatcctgcagtttaacctgctgggggtgcctctggtcggggccgacgtctgcggcttcctgggcaacacctcagaggagctgtgtgtgcgctggacccagctgggggccttctaccccttcatgcggaaccacaacagcctgctcagtctgccccaggagccgtacagcttcagcgagccggcccagcaggccatgaggaaggccctcaccctgcgctacgcactcctcccccacctctacacactgttccaccaggcccacgtcgcgggggagaccgtggcccggcccctcttcctggagttccccaaggactctagcacctggactgtggaccaccagctcctgtggggggaggccctgctcatcaccccagtgctccaggccgggaaggccgaagtgactggctacttccccttgggcacatggtacgacctgcagacggtgccagtagaggcccttggcagcctcccacccccacctgcagctccccgtgagccagccatccacagcgaggggcagtgggtgacgctgccggcccccctggacaccatcaacgtccacctccgggctgggtacatcatccccctgcagggccctggcctcacaaccacagagtcccgccagcagcccatggccctggctgtggccctgaccaagggtggggaggcccgaggggagctgttctgggacgatggagagagcctggaagtgctggagcgaggggcctacacacaggtcatcttcctggccaggaataacacgatcgtgaatgagctggtacgtgtgaccagtgagggagctggcctgcagctgcagaaggtgactgtcctgggcgtggccacggcgccccagcaggtcctctccaacggtgtccctgtctccaacttcacctacagccccgacaccaaggtcctggacatctgtgtctcgctgttgatgggagagcagtttctcgtcagctggtgt

SEQ ID NO: 663 - DNA, 3417 bp, synthetic construct
  source 1..3417: mol_type = other DNA
gacatccagatgacacagagcccatcctctgtgtctgcctctgtgggagacagagtgaccatcacctgtagagccagccagggcattgcttcttggctggcctggtatcagcagaagcctggaaaggcccctgagctgctgatctatgctgccagctctctgcaaggtggtgtccccagcagattcagtggcagtggctctggcacagacttcaccctgaccataagcagcctgcagcctgaggactttgccatctactactgccagcaggccaactacttcccctggacatttggccagggcaccaaggtggaaatcaaaggtggtggtggaagtggtggtggtggcagtggtggtggtggaagccagatcaccctgaaagagtctggccccacactggtcaagcccacacagaccctgacactgacctgcaccttctctggcttcagcctgagcaccagtggtgttggagttgtgtggatcagacagcctcctggcaaggccctggaatggctggcactgatctactggaatgaccacaagagatacagccccagcctgggcagcagactgacaatcaccaaggacaccagcaagaaccaggtggtgctgaccatgaccaacatggaccctgtggacacagccacctactattgtgcccactactctggcagctacagctactactactatggcctggatgtgtggggacagggcacaacagtgacagtgtccagtggtggtggtggcagtggtggtggaggatctgcccatcctggcagacctagagctgtgcccacacagtgtgatgtgcctccaaacagcagatttgactgtgcccctgacaaggccatcacacaagagcagtgtgaagccagaggctgctgttacatccctgccaagcaaggactgcaaggggctcagatgggacagccctggtgcttcttcccaccatcttaccccagctacaagctggaaaacctgagcagctctgagatgggctacactgctacactgaccagaaccacacctacattcttcccaaaggacatcctgacactgaggctggatgtgatgatggaaacagagaacaggctgcacttcaccatcaaggaccctgccaatagaagatatgaggtgcccctggaaacccctcatgtgcactctagagccccatctccactgtactctgtggaattttctgaggaaccctttggggtcatagtcagaaggcagctggatggcagagtgctgctgaacacaactgtggcccctctgttctttgctgatcagttcctgcagctgagcaccagcctgcctagccagtatatcacaggcctggcagagcacctgtctccactgatgctgagcacatcctggaccagaatcaccctgtggaacagagacctggctcccacacctggggccaacctgtatggctctcaccccttctatctggccctggaagatggtggttcagcccatggtgtctttctgctgaactccaatgccatggatgtggtgctgcagccctctcctgctctgtcttggagaagcactggtggcatcctggatgtgtacatctttctgggccctgagcctaagtctgtggtgcagcagtacctggatgttgtgggctaccccttcatgcctccttattggggcctgggcttccacctgtgcagatggggatacagcagcacagccatcaccagacaggttgtggaaaacatgaccagagcacacttcccactggatgtgcagtggaatgacctggactacatggacagcagaagggacttcaccttcaacaaggatggcttcagagacttccctgccatggtgcaagagctgcaccaaggtggtagaagatatatgatgattgtggacccagccatcagctcctctggaccagctggcagctacagaccctatgatgagggactgagaagaggggtgttcatcaccaatgagacaggccagcctctgattggcaaagtgtggccaggctccacagcctttccagatttcacaaaccccacagctctggcttggtgggaagatatggtggcagagttccatgatcaggtgccctttgatggcatgtggattgacatgaatgagcccagcaacttcatcaggggctctgaggatggatgccccaacaatgaactggaaaatcctccttatgtgcctggtgttgttggagggacactgcaggcagccacaatttgtgccagctctcaccagtttctgagcacccactacaacctgcacaatctgtatggcctgactgaggccattgccagccacagggctcttgtgaaggctagaggcaccagaccttttgtgatcagcaggtccacctttgctggccatggcagatatgctggccactggactggggatgtgtggtctagttgggagcagctggctagctctgtgcctgagatcctgcagttcaacctgctgggagtgccccttgttggagcagatgtgtgtggcttcctgggcaacacctcagaggaactgtgtgtcagatggactcagctgggagcattctaccctttcatgagaaaccacaacagcctgctgagcctgcctcaagagccttacagcttttctgagccagcacagcaggccatgagaaaggccctgactctgagatatgccctgctgcctcacctgtacaccctgttccatcaggctcatgtggctggggagactgtggctagacccctgttcctggaattccccaaggacagctccacctggacagtggatcatcagctgctgtggggagaagccctgctgattacacctgtgctgcaggctggcaaggctgaagtgacaggctacttccctcttggcacttggtatgacctgcagacagtgcctgtggaagctctgggatctctgcctccacctcctgctgctcctagagagcctgccattcactctgaaggccagtgggttaccctgcctgctccactggataccatcaatgtgcatctgagagcaggctacatcatccctctgcaaggccctggcctgaccaccacagaatctagacagcagccaatggcactggctgtggccctgaccaaaggtggagaagctagaggggagctgttctgggatgatggggagagcctggaagtgctggaaagaggggcctatacacaagtgatttttctggctaggaacaataccattgtgaatgagcttgtcagagtcacctctgaaggtgctggcctgcagctccagaaagtgacagtgcttggagtggccacagcaccccagcaagtgctgtctaatggggtgccagtgtccaacttcacatacagccctgataccaaggtcctggacatctgtgtgtccctgcttatgggagagcagttcctggtgtcttggtgc

SEQ ID NO: 664 - DNA, 3417 bp, synthetic construct
  source 1..3417: mol_type = other DNA
gacatccagatgacccagagcccaagctctgtgtctgcctcagtgggagacagagtgacaatcacctgcagagccagccagggcattgccagctggctggcctggtaccagcagaagcctggcaaagctcctgaactcctgatctatgctgccagcagcctgcagggtggggtgcctagcaggttctctggctcaggctctggcacagacttcaccctgacaatcagcagcctgcagcctgaggactttgctatctactactgccagcaggccaactacttcccctggacctttggccaaggcaccaaggtggagatcaagggaggaggaggctctggtggaggtggctctgggggagggggcagccagatcaccctgaaggagagtggccctacactggttaagcccacccagacactgacactgacctgcaccttctctggcttcagcctgagcaccagtggagtgggagtggtgtggatcagacagccccctggcaaggccctggaatggctggccctgatctactggaatgatcacaagagatacagccctagcctgggctccagactgaccatcaccaaggacaccagcaaaaaccaggtggtgctgaccatgaccaacatggatccagtggacacagccacctactactgtgcccactactctggcagctacagctactactactatggcctggatgtctggggccaaggcaccacagtcacagtgtccagtgggggtggaggctctggaggaggaggcagtgcccatcctggcagacctagagctgtgcccacacagtgtgatgtgcctccaaacagcagatttgactgtgcccctgacaaggccatcacacaagagcagtgtgaagccagaggctgctgttacatccctgccaagcaaggactgcaaggggctcagatgggacagccctggtgcttcttcccaccatcttaccccagctacaagctggaaaacctgagcagctctgagatgggctacactgctacactgaccagaaccacacctacattcttcccaaaggacatcctgacactgaggctggatgtgatgatggaaacagagaacaggctgcacttcaccatcaaggaccctgccaatagaagatatgaggtgcccctggaaacccctcatgtgcactctagagccccatctccactgtactctgtggaattttctgaggaaccctttggggtcatagtcagaaggcagctggatggcagagtgctgctgaacacaactgtggcccctctgttctttgctgatcagttcctgcagctgagcaccagcctgcctagccagtatatcacaggcctggcagagcacctgtctccactgatgctgagcacatcctggaccagaatcaccctgtggaacagagacctggctcccacacctggggccaacctgtatggctctcaccccttctatctggccctggaagatggtggttcagcccatggtgtctttctgctgaactccaatgccatggatgtggtgctgcagccctctcctgctctgtcttggagaagcactggtggcatcctggatgtgtacatctttctgggccctgagcctaagtctgtggtgcagcagtacctggatgttgtgggctaccccttcatgcctccttattggggcctgggcttccacctgtgcagatggggatacagcagcacagccatcaccagacaggttgtggaaaacatgaccagagcacacttcccactggatgtgcagtggaatgacctggactacatggacagcagaagggacttcaccttcaacaaggatggcttcagagacttccctgccatggtgcaagagctgcaccaaggtggtagaagatatatgatgattgtggacccagccatcagctcctctggaccagctggcagctacagaccctatgatgagggactgagaagaggggtgttcatcaccaatgagacaggccagcctctgattggcaaagtgtggccaggctccacagcctttccagatttcacaaaccccacagctctggcttggtgggaagatatggtggcagagttccatgatcaggtgccctttgatggcatgtggattgacatgaatgagcccagcaacttcatcaggggctctgaggatggatgccccaacaatgaactggaaaatcctccttatgtgcctggtgttgttggagggacactgcaggcagccacaatttgtgccagctctcaccagtttctgagcacccactacaacctgcacaatctgtatggcctgactgaggccattgccagccacagggctcttgtgaaggctagaggcaccagaccttttgtgatcagcaggtccacctttgctggccatggcagatatgctggccactggactggggatgtgtggtctagttgggagcagctggctagctctgtgcctgagatcctgcagttcaacctgctgggagtgccccttgttggagcagatgtgtgtggcttcctgggcaacacctcagaggaactgtgtgtcagatggactcagctgggagcattctaccctttcatgagaaaccacaacagcctgctgagcctgcctcaagagccttacagcttttctgagccagcacagcaggccatgagaaaggccctgactctgagatatgccctgctgcctcacctgtacaccctgttccatcaggctcatgtggctggggagactgtggctagacccctgttcctggaattccccaaggacagctccacctggacagtggatcatcagctgctgtggggagaagccctgctgattacacctgtgctgcaggctggcaaggctgaagtgacaggctacttccctcttggcacttggtatgacctgcagacagtgcctgtggaagctctgggatctctgcctccacctcctgctgctcctagagagcctgccattcactctgaaggccagtgggttaccctgcctgctccactggataccatcaatgtgcatctgagagcaggctacatcatccctctgcaaggccctggcctgaccaccacagaatctagacagcagccaatggcactggctgtggccctgaccaaaggtggagaagctagaggggagctgttctgggatgatggggagagcctggaagtgctggaaagaggggcctatacacaagtgatttttctggctaggaacaataccattgtgaatgagcttgtcagagtcacctctgaaggtgctggcctgcagctccagaaagtgacagtgcttggagtggccacagcaccccagcaagtgctgtctaatggggtgccagtgtccaacttcacatacagccctgataccaaggtcctggacatctgtgtgtccctgcttatgggagagcagttcctggtgtcttggtgc

SEQ ID NO: 665 - DNA, 3417 bp, synthetic construct
  source 1..3417: mol_type = other DNA
gatatccagatgacacaaagcccttcctctgtgtctgcttcagtgggagacagagtcacaatcacatgcagagccagccagggcattgccagctggctggcctggtaccagcagaagcctggcaaagccccagaactgctgatctatgctgccagcagcctccagggtggggtgcccagcagattctctggctctggctctggcacagacttcaccctgaccatcagcagcctgcagccagaggactttgccatctactactgccagcaggccaactacttcccctggacctttggccagggcaccaaggtggaaatcaaggggggaggaggctctggaggaggaggcagtggtggaggaggcagccagatcaccctgaaggagtctggccctaccctggtgaagcctacccagaccctgaccctgacctgcaccttctctggcttcagcctgagcacaagtggtgtgggagtggtgtggatcagacaaccccctggcaaggctctggagtggctggccctgatctactggaatgaccacaagagatacagccctagcctgggcagcaggctgaccatcaccaaagataccagcaagaaccaggtggtgctgaccatgaccaacatggaccctgttgacacagccacatactactgtgcccactacagtggcagctacagctactactactatggcctggatgtctggggccagggcaccacagtgacagtgtcctcagggggtggaggctctgggggaggaggcagtgcccatcctggcagacctagagctgtgcccacacagtgtgatgtgcctccaaacagcagatttgactgtgcccctgacaaggccatcacacaagagcagtgtgaagccagaggctgctgttacatccctgccaagcaaggactgcaaggggctcagatgggacagccctggtgcttcttcccaccatcttaccccagctacaagctggaaaacctgagcagctctgagatgggctacactgctacactgaccagaaccacacctacattcttcccaaaggacatcctgacactgaggctggatgtgatgatggaaacagagaacaggctgcacttcaccatcaaggaccctgccaatagaagatatgaggtgcccctggaaacccctcatgtgcactctagagccccatctccactgtactctgtggaattttctgaggaaccctttggggtcatagtcagaaggcagctggatggcagagtgctgctgaacacaactgtggcccctctgttctttgctgatcagttcctgcagctgagcaccagcctgcctagccagtatatcacaggcctggcagagcacctgtctccactgatgctgagcacatcctggaccagaatcaccctgtggaacagagacctggctcccacacctggggccaacctgtatggctctcaccccttctatctggccctggaagatggtggttcagcccatggtgtctttctgctgaactccaatgccatggatgtggtgctgcagccctctcctgctctgtcttggagaagcactggtggcatcctggatgtgtacatctttctgggccctgagcctaagtctgtggtgcagcagtacctggatgttgtgggctaccccttcatgcctccttattggggcctgggcttccacctgtgcagatggggatacagcagcacagccatcaccagacaggttgtggaaaacatgaccagagcacacttcccactggatgtgcagtggaatgacctggactacatggacagcagaagggacttcaccttcaacaaggatggcttcagagacttccctgccatggtgcaagagctgcaccaaggtggtagaagatatatgatgattgtggacccagccatcagctcctctggaccagctggcagctacagaccctatgatgagggactgagaagaggggtgttcatcaccaatgagacaggccagcctctgattggcaaagtgtggccaggctccacagcctttccagatttcacaaaccccacagctctggcttggtgggaagatatggtggcagagttccatgatcaggtgccctttgatggcatgtggattgacatgaatgagcccagcaacttcatcaggggctctgaggatggatgccccaacaatgaactggaaaatcctccttatgtgcctggtgttgttggagggacactgcaggcagccacaatttgtgccagctctcaccagtttctgagcacccactacaacctgcacaatctgtatggcctgactgaggccattgccagccacagggctcttgtgaaggctagaggcaccagaccttttgtgatcagcaggtccacctttgctggccatggcagatatgctggccactggactggggatgtgtggtctagttgggagcagctggctagctctgtgcctgagatcctgcagttcaacctgctgggagtgccccttgttggagcagatgtgtgtggcttcctgggcaacacctcagaggaactgtgtgtcagatggactcagctgggagcattctaccctttcatgagaaaccacaacagcctgctgagcctgcctcaagagccttacagcttttctgagccagcacagcaggccatgagaaaggccctgactctgagatatgccctgctgcctcacctgtacaccctgttccatcaggctcatgtggctggggagactgtggctagacccctgttcctggaattccccaaggacagctccacctggacagtggatcatcagctgctgtggggagaagccctgctgattacacctgtgctgcaggctggcaaggctgaagtgacaggctacttccctcttggcacttggtatgacctgcagacagtgcctgtggaagctctgggatctctgcctccacctcctgctgctcctagagagcctgccattcactctgaaggccagtgggttaccctgcctgctccactggataccatcaatgtgcatctgagagcaggctacatcatccctctgcaaggccctggcctgaccaccacagaatctagacagcagccaatggcactggctgtggccctgaccaaaggtggagaagctagaggggagctgttctgggatgatggggagagcctggaagtgctggaaagaggggcctatacacaagtgatttttctggctaggaacaataccattgtgaatgagcttgtcagagtcacctctgaaggtgctggcctgcagctccagaaagtgacagtgcttggagtggccacagcaccccagcaagtgctgtctaatggggtgccagtgtccaacttcacatacagccctgataccaaggtcctggacatctgtgtgtccctgcttatgggagagcagttcctggtgtcttggtgc

SEQ ID NO: 666 - DNA, 3405 bp, synthetic construct
  source 1..3405: mol_type = other DNA
gacatccagatgacacagagcccctctagcctgtctgcctctgtgggagacagagtgaccatcacctgtagagccagccagagcatcagcagctacctgaactggtatcagcagaagcctggcaaggcccctaaactgctgatctatgctgccagcagcctgcagtctggggtgccctctagattttctggcagtggctctggcacagacttcaccctgaccataagctccctgcagcctgaggactttgccacctactactgtcagcagagctacagcacccctcctatcacctttggccagggcaccagactggaaatcaaaggtggtggtggaagtggtggtggtggcagtggtggtggtggatctgaagtgcagctggtggaaagtggtggtggcctggttcagcctggtggctctctgagactgagctgtgcagcctctggcttcaccttcaacatctttgagatgaactgggtcagacaggccccaggcaaaggcctggaatggatcagctacatcagctccagaggcaccacaacctactatgctgactctgtcagaggcaggttcaccatcagcagagacaatgccaagaacagcctgtacctgcagatgaactccctgagagctgaggacacagcagtgtactactgtgccagggactatgaggctacaatcccctttgacttctggggccagggaaccctggtcacagttagcagtggtggtggtggtagtggtggtggtggctctgcccatcctggcagacctagagctgtgcccacacagtgtgatgtgcctccaaacagcagatttgactgtgcccctgacaaggccatcacacaagagcagtgtgaagccagaggctgctgttacatccctgccaagcaaggactgcaaggggctcagatgggacagccctggtgcttcttcccaccatcttaccccagctacaagctggaaaacctgagcagctctgagatgggctacactgctacactgaccagaaccacacctacattcttcccaaaggacatcctgacactgaggctggatgtgatgatggaaacagagaacaggctgcacttcaccatcaaggaccctgccaatagaagatatgaggtgcccctggaaacccctcatgtgcactctagagccccatctccactgtactctgtggaattttctgaggaaccctttggggtcatagtcagaaggcagctggatggcagagtgctgctgaacacaactgtggcccctctgttctttgctgatcagttcctgcagctgagcaccagcctgcctagccagtatatcacaggcctggcagagcacctgtctccactgatgctgagcacatcctggaccagaatcaccctgtggaacagagacctggctcccacacctggggccaacctgtatggctctcaccccttctatctggccctggaagatggtggttcagcccatggtgtctttctgctgaactccaatgccatggatgtggtgctgcagccctctcctgctctgtcttggagaagcactggtggcatcctggatgtgtacatctttctgggccctgagcctaagtctgtggtgcagcagtacctggatgttgtgggctaccccttcatgcctccttattggggcctgggcttccacctgtgcagatggggatacagcagcacagccatcaccagacaggttgtggaaaacatgaccagagcacacttcccactggatgtgcagtggaatgacctggactacatggacagcagaagggacttcaccttcaacaaggatggcttcagagacttccctgccatggtgcaagagctgcaccaaggtggtagaagatatatgatgattgtggacccagccatcagctcctctggaccagctggcagctacagaccctatgatgagggactgagaagaggggtgttcatcaccaatgagacaggccagcctctgattggcaaagtgtggccaggctccacagcctttccagatttcacaaaccccacagctctggcttggtgggaagatatggtggcagagttccatgatcaggtgccctttgatggcatgtggattgacatgaatgagcccagcaacttcatcaggggctctgaggatggatgccccaacaatgaactggaaaatcctccttatgtgcctggtgttgttggagggacactgcaggcagccacaatttgtgccagctctcaccagtttctgagcacccactacaacctgcacaatctgtatggcctgactgaggccattgccagccacagggctcttgtgaaggctagaggcaccagaccttttgtgatcagcaggtccacctttgctggccatggcagatatgctggccactggactggggatgtgtggtctagttgggagcagctggctagctctgtgcctgagatcctgcagttcaacctgctgggagtgccccttgttggagcagatgtgtgtggcttcctgggcaacacctcagaggaactgtgtgtcagatggactcagctgggagcattctaccctttcatgagaaaccacaacagcctgctgagcctgcctcaagagccttacagcttttctgagccagcacagcaggccatgagaaaggccctgactctgagatatgccctgctgcctcacctgtacaccctgttccatcaggctcatgtggctggggagactgtggctagacccctgttcctggaattccccaaggacagctccacctggacagtggatcatcagctgctgtggggagaagccctgctgattacacctgtgctgcaggctggcaaggctgaagtgacaggctacttccctcttggcacttggtatgacctgcagacagtgcctgtggaagctctgggatctctgcctccacctcctgctgctcctagagagcctgccattcactctgaaggccagtgggttaccctgcctgctccactggataccatcaatgtgcatctgagagcaggctacatcatccctctgcaaggccctggcctgaccaccacagaatctagacagcagccaatggcactggctgtggccctgaccaaaggtggagaagctagaggggagctgttctgggatgatggggagagcctggaagtgctggaaagaggggcctatacacaagtgatttttctggctaggaacaataccattgtgaatgagcttgtcagagtcacctctgaaggtgctggcctgcagctccagaaagtgacagtgcttggagtggccacagcaccccagcaagtgctgtctaatggggtgccagtgtccaacttcacatacagccctgataccaaggtcctggacatctgtgtgtccctgcttatgggagagcagttcctggtgtcttggtgc

SEQ ID NO: 667 - DNA, 3405 bp, synthetic construct
  source 1..3405: mol_type = other DNA
gacatccagatgacccagagccccagcagcctgtctgcctctgtgggtgacagggtgaccattacctgcagagccagccaaagcatcagcagctacctgaactggtaccagcagaagccaggcaaggcccctaagctgctgatctatgctgccagcagcctgcaatctggagtgcctagcagattcagtggctctggctcaggcacagacttcaccctgaccatctccagcctccagcctgaggattttgccacctactactgccagcagagctacagcaccccccctatcacctttggccagggcaccagactggaaatcaagggaggaggaggctctggaggaggaggctctggagggggaggctctgaggtgcagctggtggagtctgggggaggcctggtgcagcctggaggctccctgaggctgagctgtgctgcctcaggcttcaccttcaacatctttgaaatgaactgggtcagacaggcccctggcaaaggcctggaatggatcagctacatcagcagcagaggcacaacaacatactatgctgactctgtgagaggcaggttcacaatcagcagagacaatgccaagaacagcctgtacctgcagatgaacagcctgagagcagaggatacagctgtgtactactgtgccagagactatgaggccaccatcccctttgatttctggggccagggcaccctggttacagtgtccagtggtgggggtggctctgggggtggaggcagtgcccatcctggcagacctagagctgtgcccacacagtgtgatgtgcctccaaacagcagatttgactgtgcccctgacaaggccatcacacaagagcagtgtgaagccagaggctgctgttacatccctgccaagcaaggactgcaaggggctcagatgggacagccctggtgcttcttcccaccatcttaccccagctacaagctggaaaacctgagcagctctgagatgggctacactgctacactgaccagaaccacacctacattcttcccaaaggacatcctgacactgaggctggatgtgatgatggaaacagagaacaggctgcacttcaccatcaaggaccctgccaatagaagatatgaggtgcccctggaaacccctcatgtgcactctagagccccatctccactgtactctgtggaattttctgaggaaccctttggggtcatagtcagaaggcagctggatggcagagtgctgctgaacacaactgtggcccctctgttctttgctgatcagttcctgcagctgagcaccagcctgcctagccagtatatcacaggcctggcagagcacctgtctccactgatgctgagcacatcctggaccagaatcaccctgtggaacagagacctggctcccacacctggggccaacctgtatggctctcaccccttctatctggccctggaagatggtggttcagcccatggtgtctttctgctgaactccaatgccatggatgtggtgctgcagccctctcctgctctgtcttggagaagcactggtggcatcctggatgtgtacatctttctgggccctgagcctaagtctgtggtgcagcagtacctggatgttgtgggctaccccttcatgcctccttattggggcctgggcttccacctgtgcagatggggatacagcagcacagccatcaccagacaggttgtggaaaacatgaccagagcacacttcccactggatgtgcagtggaatgacctggactacatggacagcagaagggacttcaccttcaacaaggatggcttcagagacttccctgccatggtgcaagagctgcaccaaggtggtagaagatatatgatgattgtggacccagccatcagctcctctggaccagctggcagctacagaccctatgatgagggactgagaagaggggtgttcatcaccaatgagacaggccagcctctgattggcaaagtgtggccaggctccacagcctttccagatttcacaaaccccacagctctggcttggtgggaagatatggtggcagagttccatgatcaggtgccctttgatggcatgtggattgacatgaatgagcccagcaacttcatcaggggctctgaggatggatgccccaacaatgaactggaaaatcctccttatgtgcctggtgttgttggagggacactgcaggcagccacaatttgtgccagctctcaccagtttctgagcacccactacaacctgcacaatctgtatggcctgactgaggccattgccagccacagggctcttgtgaaggctagaggcaccagaccttttgtgatcagcaggtccacctttgctggccatggcagatatgctggccactggactggggatgtgtggtctagttgggagcagctggctagctctgtgcctgagatcctgcagttcaacctgctgggagtgccccttgttggagcagatgtgtgtggcttcctgggcaacacctcagaggaactgtgtgtcagatggactcagctgggagcattctaccctttcatgagaaaccacaacagcctgctgagcctgcctcaagagccttacagcttttctgagccagcacagcaggccatgagaaaggccctgactctgagatatgccctgctgcctcacctgtacaccctgttccatcaggctcatgtggctggggagactgtggctagacccctgttcctggaattccccaaggacagctccacctggacagtggatcatcagctgctgtggggagaagccctgctgattacacctgtgctgcaggctggcaaggctgaagtgacaggctacttccctcttggcacttggtatgacctgcagacagtgcctgtggaagctctgggatctctgcctccacctcctgctgctcctagagagcctgccattcactctgaaggccagtgggttaccctgcctgctccactggataccatcaatgtgcatctgagagcaggctacatcatccctctgcaaggccctggcctgaccaccacagaatctagacagcagccaatggcactggctgtggccctgaccaaaggtggagaagctagaggggagctgttctgggatgatggggagagcctggaagtgctggaaagaggggcctatacacaagtgatttttctggctaggaacaataccattgtgaatgagcttgtcagagtcacctctgaaggtgctggcctgcagctccagaaagtgacagtgcttggagtggccacagcaccccagcaagtgctgtctaatggggtgccagtgtccaacttcacatacagccctgataccaaggtcctggacatctgtgtgtccctgcttatgggagagcagttcctggtgtcttggtgc

SEQ ID NO: 668 - DNA, 3405 bp, synthetic construct
  source 1..3405: mol_type = other DNA
gatatccaaatgacccagagccccagctccctgtcagcctctgtgggagacagagtgaccatcacatgcagagccagccagagcatcagcagctacctgaactggtaccagcagaagcctggcaaggcccccaagctgctgatctatgctgccagcagcctgcagtctggagtgccttccagattctctggctcaggcagtggcacagacttcaccctgacaatcagcagcctgcagcctgaagactttgccacctactactgccagcagagctacagcacaccacctatcacctttggccagggcaccagactggagatcaaagggggtgggggctctggggggggaggcagtggaggaggtggctctgaagtccagctggtggagtctggaggaggcctggtgcagcctggaggcagcctgaggctgtcctgtgcagcctctggcttcaccttcaacatctttgagatgaactgggttaggcaggcccctggcaagggcctggaatggatcagctacattagcagcagaggcaccacaacctactatgctgactctgtgaggggcagattcaccatcagcagagataatgccaagaacagcctgtacctgcagatgaacagcctcagagctgaggacacagctgtgtactactgtgccagagattatgaggccaccatcccctttgacttctggggccaaggcaccctggtgacagtgtcttctggaggtggaggctctggaggaggtggcagtgcccatcctggcagacctagagctgtgcccacacagtgtgatgtgcctccaaacagcagatttgactgtgcccctgacaaggccatcacacaagagcagtgtgaagccagaggctgctgttacatccctgccaagcaaggactgcaaggggctcagatgggacagccctggtgcttcttcccaccatcttaccccagctacaagctggaaaacctgagcagctctgagatgggctacactgctacactgaccagaaccacacctacattcttcccaaaggacatcctgacactgaggctggatgtgatgatggaaacagagaacaggctgcacttcaccatcaaggaccctgccaatagaagatatgaggtgcccctggaaacccctcatgtgcactctagagccccatctccactgtactctgtggaattttctgaggaaccctttggggtcatagtcagaaggcagctggatggcagagtgctgctgaacacaactgtggcccctctgttctttgctgatcagttcctgcagctgagcaccagcctgcctagccagtatatcacaggcctggcagagcacctgtctccactgatgctgagcacatcctggaccagaatcaccctgtggaacagagacctggctcccacacctggggccaacctgtatggctctcaccccttctatctggccctggaagatggtggttcagcccatggtgtctttctgctgaactccaatgccatggatgtggtgctgcagccctctcctgctctgtcttggagaagcactggtggcatcctggatgtgtacatctttctgggccctgagcctaagtctgtggtgcagcagtacctggatgttgtgggctaccccttcatgcctccttattggggcctgggcttccacctgtgcagatggggatacagcagcacagccatcaccagacaggttgtggaaaacatgaccagagcacacttcccactggatgtgcagtggaatgacctggactacatggacagcagaagggacttcaccttcaacaaggatggcttcagagacttccctgccatggtgcaagagctgcaccaaggtggtagaagatatatgatgattgtggacccagccatcagctcctctggaccagctggcagctacagaccctatgatgagggactgagaagaggggtgttcatcaccaatgagacaggccagcctctgattggcaaagtgtggccaggctccacagcctttccagatttcacaaaccccacagctctggcttggtgggaagatatggtggcagagttccatgatcaggtgccctttgatggcatgtggattgacatgaatgagcccagcaacttcatcaggggctctgaggatggatgccccaacaatgaactggaaaatcctccttatgtgcctggtgttgttggagggacactgcaggcagccacaatttgtgccagctctcaccagtttctgagcacccactacaacctgcacaatctgtatggcctgactgaggccattgccagccacagggctcttgtgaaggctagaggcaccagaccttttgtgatcagcaggtccacctttgctggccatggcagatatgctggccactggactggggatgtgtggtctagttgggagcagctggctagctctgtgcctgagatcctgcagttcaacctgctgggagtgccccttgttggagcagatgtgtgtggcttcctgggcaacacctcagaggaactgtgtgtcagatggactcagctgggagcattctaccctttcatgagaaaccacaacagcctgctgagcctgcctcaagagccttacagcttttctgagccagcacagcaggccatgagaaaggccctgactctgagatatgccctgctgcctcacctgtacaccctgttccatcaggctcatgtggctggggagactgtggctagacccctgttcctggaattccccaaggacagctccacctggacagtggatcatcagctgctgtggggagaagccctgctgattacacctgtgctgcaggctggcaaggctgaagtgacaggctacttccctcttggcacttggtatgacctgcagacagtgcctgtggaagctctgggatctctgcctccacctcctgctgctcctagagagcctgccattcactctgaaggccagtgggttaccctgcctgctccactggataccatcaatgtgcatctgagagcaggctacatcatccctctgcaaggccctggcctgaccaccacagaatctagacagcagccaatggcactggctgtggccctgaccaaaggtggagaagctagaggggagctgttctgggatgatggggagagcctggaagtgctggaaagaggggcctatacacaagtgatttttctggctaggaacaataccattgtgaatgagcttgtcagagtcacctctgaaggtgctggcctgcagctccagaaagtgacagtgcttggagtggccacagcaccccagcaagtgctgtctaatggggtgccagtgtccaacttcacatacagccctgataccaaggtcctggacatctgtgtgtccctgcttatgggagagcagttcctggtgtcttggtgc

SEQ ID NO: 669 - DNA, 3411 bp, synthetic construct
  source 1..3411: mol_type = other DNA
gacatccagatgacacagagcccctctagcctgtctgcctctgtgggagacagagtgaccatcacctgtagagccagccagagcatcagcagctacctgaactggtatcagcagaagcctggcaaggcccctaaactgctgatctatgctgccagcagcctgcagtctggggtgccctctagattttctggcagtggctctggcacagacttcaccctgaccataagctccctgcagcctgaggactttgccacctactactgtcagcagagctacagcacccctcctatcacctttggccagggcaccagactggaaatcaaaggtggtggtggaagtggtggtggtggcagtggtggtggtggatctgaagtgcagctggtggaaagtggtggtggcctggttcagcctggcagatccctgagactgagctgtgcagcctctggctttacctttgatgactatgccatgaactgggtcagacaggccccaggcaaaggcctggaatgggtgtcaggcatctcttggtcctctggctccatggactatgctgactctgtgaagggcagattcaccatcagcagagacaatgccaagaacagcctgtacctgcagatgaactccctgagaacagaggacacagccctgtactactgtgccaaggccagagaagtgggagactactatggcatggatgtgtggggccagggaaccacagtgacagtcagtagtggtggtggtggcagtggtggtggtggttctgcccatcctggcagacctagagctgtgcccacacagtgtgatgtgcctccaaacagcagatttgactgtgcccctgacaaggccatcacacaagagcagtgtgaagccagaggctgctgttacatccctgccaagcaaggactgcaaggggctcagatgggacagccctggtgcttcttcccaccatcttaccccagctacaagctggaaaacctgagcagctctgagatgggctacactgctacactgaccagaaccacacctacattcttcccaaaggacatcctgacactgaggctggatgtgatgatggaaacagagaacaggctgcacttcaccatcaaggaccctgccaatagaagatatgaggtgcccctggaaacccctcatgtgcactctagagccccatctccactgtactctgtggaattttctgaggaaccctttggggtcatagtcagaaggcagctggatggcagagtgctgctgaacacaactgtggcccctctgttctttgctgatcagttcctgcagctgagcaccagcctgcctagccagtatatcacaggcctggcagagcacctgtctccactgatgctgagcacatcctggaccagaatcaccctgtggaacagagacctggctcccacacctggggccaacctgtatggctctcaccccttctatctggccctggaagatggtggttcagcccatggtgtctttctgctgaactccaatgccatggatgtggtgctgcagccctctcctgctctgtcttggagaagcactggtggcatcctggatgtgtacatctttctgggccctgagcctaagtctgtggtgcagcagtacctggatgttgtgggctaccccttcatgcctccttattggggcctgggcttccacctgtgcagatggggatacagcagcacagccatcaccagacaggttgtggaaaacatgaccagagcacacttcccactggatgtgcagtggaatgacctggactacatggacagcagaagggacttcaccttcaacaaggatggcttcagagacttccctgccatggtgcaagagctgcaccaaggtggtagaagatatatgatgattgtggacccagccatcagctcctctggaccagctggcagctacagaccctatgatgagggactgagaagaggggtgttcatcaccaatgagacaggccagcctctgattggcaaagtgtggccaggctccacagcctttccagatttcacaaaccccacagctctggcttggtgggaagatatggtggcagagttccatgatcaggtgccctttgatggcatgtggattgacatgaatgagcccagcaacttcatcaggggctctgaggatggatgccccaacaatgaactggaaaatcctccttatgtgcctggtgttgttggagggacactgcaggcagccacaatttgtgccagctctcaccagtttctgagcacccactacaacctgcacaatctgtatggcctgactgaggccattgccagccacagggctcttgtgaaggctagaggcaccagaccttttgtgatcagcaggtccacctttgctggccatggcagatatgctggccactggactggggatgtgtggtctagttgggagcagctggctagctctgtgcctgagatcctgcagttcaacctgctgggagtgccccttgttggagcagatgtgtgtggcttcctgggcaacacctcagaggaactgtgtgtcagatggactcagctgggagcattctaccctttcatgagaaaccacaacagcctgctgagcctgcctcaagagccttacagcttttctgagccagcacagcaggccatgagaaaggccctgactctgagatatgccctgctgcctcacctgtacaccctgttccatcaggctcatgtggctggggagactgtggctagacccctgttcctggaattccccaaggacagctccacctggacagtggatcatcagctgctgtggggagaagccctgctgattacacctgtgctgcaggctggcaaggctgaagtgacaggctacttccctcttggcacttggtatgacctgcagacagtgcctgtggaagctctgggatctctgcctccacctcctgctgctcctagagagcctgccattcactctgaaggccagtgggttaccctgcctgctccactggataccatcaatgtgcatctgagagcaggctacatcatccctctgcaaggccctggcctgaccaccacagaatctagacagcagccaatggcactggctgtggccctgaccaaaggtggagaagctagaggggagctgttctgggatgatggggagagcctggaagtgctggaaagaggggcctatacacaagtgatttttctggctaggaacaataccattgtgaatgagcttgtcagagtcacctctgaaggtgctggcctgcagctccagaaagtgacagtgcttggagtggccacagcaccccagcaagtgctgtctaatggggtgccagtgtccaacttcacatacagccctgataccaaggtcctggacatctgtgtgtccctgcttatgggagagcagttcctggtgtcttggtgc

SEQ ID NO: 670 - DNA, 3411 bp, synthetic construct
  source 1..3411: mol_type = other DNA
gatatccagatgacccagagccccagcagcctgtctgccagtgtgggggatagagtgaccatcacctgcagggccagccagagcatcagcagctacctcaactggtaccagcaaaagcctggcaaggcccccaaactgctgatttatgctgccagcagcctgcagtctggggtcccttccagattctctggctctggctctggcacagacttcaccctgaccatcagcagcctgcagccagaggactttgccacatactactgccagcagagctacagcaccccccctatcacctttggccagggcaccaggctggagatcaagggaggtgggggctcaggaggaggtggctctggaggaggaggctcagaggtgcagctggttgagagtggaggaggcctggtgcagcctggcagaagcctgagactgagctgtgctgcctctggcttcacctttgatgactatgccatgaactgggtgagacaggcccctggcaagggcctggaatgggtgtctggcatctcctggagctctggcagcatggactatgctgactctgtgaagggcaggttcaccatcagcagagacaatgccaagaacagcctgtacctgcagatgaacagcctgagaacagaagacacagccctgtactactgtgcaaaagccagagaagtgggagactactatggcatggatgtgtggggccaaggcaccacagtgacagtgagcagtggtggaggtggctcagggggaggaggcagtgcccatcctggcagacctagagctgtgcccacacagtgtgatgtgcctccaaacagcagatttgactgtgcccctgacaaggccatcacacaagagcagtgtgaagccagaggctgctgttacatccctgccaagcaaggactgcaaggggctcagatgggacagccctggtgcttcttcccaccatcttaccccagctacaagctggaaaacctgagcagctctgagatgggctacactgctacactgaccagaaccacacctacattcttcccaaaggacatcctgacactgaggctggatgtgatgatggaaacagagaacaggctgcacttcaccatcaaggaccctgccaatagaagatatgaggtgcccctggaaacccctcatgtgcactctagagccccatctccactgtactctgtggaattttctgaggaaccctttggggtcatagtcagaaggcagctggatggcagagtgctgctgaacacaactgtggcccctctgttctttgctgatcagttcctgcagctgagcaccagcctgcctagccagtatatcacaggcctggcagagcacctgtctccactgatgctgagcacatcctggaccagaatcaccctgtggaacagagacctggctcccacacctggggccaacctgtatggctctcaccccttctatctggccctggaagatggtggttcagcccatggtgtctttctgctgaactccaatgccatggatgtggtgctgcagccctctcctgctctgtcttggagaagcactggtggcatcctggatgtgtacatctttctgggccctgagcctaagtctgtggtgcagcagtacctggatgttgtgggctaccccttcatgcctccttattggggcctgggcttccacctgtgcagatggggatacagcagcacagccatcaccagacaggttgtggaaaacatgaccagagcacacttcccactggatgtgcagtggaatgacctggactacatggacagcagaagggacttcaccttcaacaaggatggcttcagagacttccctgccatggtgcaagagctgcaccaaggtggtagaagatatatgatgattgtggacccagccatcagctcctctggaccagctggcagctacagaccctatgatgagggactgagaagaggggtgttcatcaccaatgagacaggccagcctctgattggcaaagtgtggccaggctccacagcctttccagatttcacaaaccccacagctctggcttggtgggaagatatggtggcagagttccatgatcaggtgccctttgatggcatgtggattgacatgaatgagcccagcaacttcatcaggggctctgaggatggatgccccaacaatgaactggaaaatcctccttatgtgcctggtgttgttggagggacactgcaggcagccacaatttgtgccagctctcaccagtttctgagcacccactacaacctgcacaatctgtatggcctgactgaggccattgccagccacagggctcttgtgaaggctagaggcaccagaccttttgtgatcagcaggtccacctttgctggccatggcagatatgctggccactggactggggatgtgtggtctagttgggagcagctggctagctctgtgcctgagatcctgcagttcaacctgctgggagtgccccttgttggagcagatgtgtgtggcttcctgggcaacacctcagaggaactgtgtgtcagatggactcagctgggagcattctaccctttcatgagaaaccacaacagcctgctgagcctgcctcaagagccttacagcttttctgagccagcacagcaggccatgagaaaggccctgactctgagatatgccctgctgcctcacctgtacaccctgttccatcaggctcatgtggctggggagactgtggctagacccctgttcctggaattccccaaggacagctccacctggacagtggatcatcagctgctgtggggagaagccctgctgattacacctgtgctgcaggctggcaaggctgaagtgacaggctacttccctcttggcacttggtatgacctgcagacagtgcctgtggaagctctgggatctctgcctccacctcctgctgctcctagagagcctgccattcactctgaaggccagtgggttaccctgcctgctccactggataccatcaatgtgcatctgagagcaggctacatcatccctctgcaaggccctggcctgaccaccacagaatctagacagcagccaatggcactggctgtggccctgaccaaaggtggagaagctagaggggagctgttctgggatgatggggagagcctggaagtgctggaaagaggggcctatacacaagtgatttttctggctaggaacaataccattgtgaatgagcttgtcagagtcacctctgaaggtgctggcctgcagctccagaaagtgacagtgcttggagtggccacagcaccccagcaagtgctgtctaatggggtgccagtgtccaacttcacatacagccctgataccaaggtcctggacatctgtgtgtccctgcttatgggagagcagttcctggtgtcttggtgc

SEQ ID NO: 671 - DNA, 3411 bp, synthetic construct
  source 1..3411: mol_type = other DNA
gacatccagatgacccagagccccagctccctgtcagccagtgtgggtgacagagtgaccatcacctgcagagccagccagagcatcagcagctacctgaactggtaccagcagaaacctggcaaagcccccaagctgctgatttatgctgctagcagcctgcagagtggagtgcccagcagattctcaggcagtggctctggcacagacttcaccctgaccatctccagcctgcagccagaagactttgccacctactactgccagcagagctacagcacccctcctatcacctttggccagggcacaagactggagatcaagggaggaggaggctctggaggaggaggctctggagggggaggctctgaggtccaactggttgaatctggagggggcctggtgcaacctggcaggagcctgagactgagctgtgctgcctctggcttcacctttgatgactatgccatgaactgggtgagacaggcccctggcaagggcctggagtgggtgtctggcatcagctggagctctggcagcatggactatgcagattctgtgaagggcaggttcaccatcagcagagataatgccaagaacagcctgtacctgcagatgaacagcctcaggacagaggacacagccctgtactactgtgccaaggccagagaagtgggtgactactatggcatggatgtgtggggccagggcaccacagtgacagtgagctctgggggaggaggctcaggtgggggtggcagtgcccatcctggcagacctagagctgtgcccacacagtgtgatgtgcctccaaacagcagatttgactgtgcccctgacaaggccatcacacaagagcagtgtgaagccagaggctgctgttacatccctgccaagcaaggactgcaaggggctcagatgggacagccctggtgcttcttcccaccatcttaccccagctacaagctggaaaacctgagcagctctgagatgggctacactgctacactgaccagaaccacacctacattcttcccaaaggacatcctgacactgaggctggatgtgatgatggaaacagagaacaggctgcacttcaccatcaaggaccctgccaatagaagatatgaggtgcccctggaaacccctcatgtgcactctagagccccatctccactgtactctgtggaattttctgaggaaccctttggggtcatagtcagaaggcagctggatggcagagtgctgctgaacacaactgtggcccctctgttctttgctgatcagttcctgcagctgagcaccagcctgcctagccagtatatcacaggcctggcagagcacctgtctccactgatgctgagcacatcctggaccagaatcaccctgtggaacagagacctggctcccacacctggggccaacctgtatggctctcaccccttctatctggccctggaagatggtggttcagcccatggtgtctttctgctgaactccaatgccatggatgtggtgctgcagccctctcctgctctgtcttggagaagcactggtggcatcctggatgtgtacatctttctgggccctgagcctaagtctgtggtgcagcagtacctggatgttgtgggctaccccttcatgcctccttattggggcctgggcttccacctgtgcagatggggatacagcagcacagccatcaccagacaggttgtggaaaacatgaccagagcacacttcccactggatgtgcagtggaatgacctggactacatggacagcagaagggacttcaccttcaacaaggatggcttcagagacttccctgccatggtgcaagagctgcaccaaggtggtagaagatatatgatgattgtggacccagccatcagctcctctggaccagctggcagctacagaccctatgatgagggactgagaagaggggtgttcatcaccaatgagacaggccagcctctgattggcaaagtgtggccaggctccacagcctttccagatttcacaaaccccacagctctggcttggtgggaagatatggtggcagagttccatgatcaggtgccctttgatggcatgtggattgacatgaatgagcccagcaacttcatcaggggctctgaggatggatgccccaacaatgaactggaaaatcctccttatgtgcctggtgttgttggagggacactgcaggcagccacaatttgtgccagctctcaccagtttctgagcacccactacaacctgcacaatctgtatggcctgactgaggccattgccagccacagggctcttgtgaaggctagaggcaccagaccttttgtgatcagcaggtccacctttgctggccatggcagatatgctggccactggactggggatgtgtggtctagttgggagcagctggctagctctgtgcctgagatcctgcagttcaacctgctgggagtgccccttgttggagcagatgtgtgtggcttcctgggcaacacctcagaggaactgtgtgtcagatggactcagctgggagcattctaccctttcatgagaaaccacaacagcctgctgagcctgcctcaagagccttacagcttttctgagccagcacagcaggccatgagaaaggccctgactctgagatatgccctgctgcctcacctgtacaccctgttccatcaggctcatgtggctggggagactgtggctagacccctgttcctggaattccccaaggacagctccacctggacagtggatcatcagctgctgtggggagaagccctgctgattacacctgtgctgcaggctggcaaggctgaagtgacaggctacttccctcttggcacttggtatgacctgcagacagtgcctgtggaagctctgggatctctgcctccacctcctgctgctcctagagagcctgccattcactctgaaggccagtgggttaccctgcctgctccactggataccatcaatgtgcatctgagagcaggctacatcatccctctgcaaggccctggcctgaccaccacagaatctagacagcagccaatggcactggctgtggccctgaccaaaggtggagaagctagaggggagctgttctgggatgatggggagagcctggaagtgctggaaagaggggcctatacacaagtgatttttctggctaggaacaataccattgtgaatgagcttgtcagagtcacctctgaaggtgctggcctgcagctccagaaagtgacagtgcttggagtggccacagcaccccagcaagtgctgtctaatggggtgccagtgtccaacttcacatacagccctgataccaaggtcctggacatctgtgtgtccctgcttatgggagagcagttcctggtgtcttggtgc

SEQ ID NO: 672 - DNA, 4014 bp, synthetic construct
  source 1..4014: mol_type = other DNA
ctgcgcgctcgctcgctcactgaggccgcccgggcaaagcccgggcgtcgggcgacctttggtcgcccggcctcagtgagcgagcgagcgcgcagagagggagtggccaactccatcactaggggttcctagatctcttaggtcagtgaagagaagaacaaaaagcagcatattacagttagttgtcttcatcaatctttaaatatgttgtgtggtttttctctccctgtttccacagttgacatccagatgacacagagcccctctagcctgtctgcctctgtgggagacagagtgaccatcacctgtagagccagccagagcatcagcagctacctgaactggtatcagcagaagcctggcaaggcccctaaactgctgatctatgctgccagcagcctgcagtctggggtgccctctagattttctggcagtggctctggcacagacttcaccctgaccataagctccctgcagcctgaggactttgccacctactactgtcagcagagctacagcacccctcctatcacctttggccagggcaccagactggaaatcaaaggtggtggtggaagtggtggtggtggcagtggtggtggtggatctgaagtgcagctggtggaaagtggtggtggcctggttcagcctggtggctctctgagactgagctgtgcagcctctggcttcaccttcaacatctttgagatgaactgggtcagacaggccccaggcaaaggcctggaatggatcagctacatcagctccagaggcaccacaacctactatgctgactctgtcagaggcaggttcaccatcagcagagacaatgccaagaacagcctgtacctgcagatgaactccctgagagctgaggacacagcagtgtactactgtgccagggactatgaggctacaatcccctttgacttctggggccagggaaccctggtcacagttagcagtggtggtggtggtagtggtggtggtggctctgcccatcctggcagacctagagctgtgcccacacagtgtgatgtgcctccaaacagcagatttgactgtgcccctgacaaggccatcacacaagagcagtgtgaagccagaggctgctgttacatccctgccaagcaaggactgcaaggggctcagatgggacagccctggtgcttcttcccaccatcttaccccagctacaagctggaaaacctgagcagctctgagatgggctacactgctacactgaccagaaccacacctacattcttcccaaaggacatcctgacactgaggctggatgtgatgatggaaacagagaacaggctgcacttcaccatcaaggaccctgccaatagaagatatgaggtgcccctggaaacccctcatgtgcactctagagccccatctccactgtactctgtggaattttctgaggaaccctttggggtcatagtcagaaggcagctggatggcagagtgctgctgaacacaactgtggcccctctgttctttgctgatcagttcctgcagctgagcaccagcctgcctagccagtatatcacaggcctggcagagcacctgtctccactgatgctgagcacatcctggaccagaatcaccctgtggaacagagacctggctcccacacctggggccaacctgtatggctctcaccccttctatctggccctggaagatggtggttcagcccatggtgtctttctgctgaactccaatgccatggatgtggtgctgcagccctctcctgctctgtcttggagaagcactggtggcatcctggatgtgtacatctttctgggccctgagcctaagtctgtggtgcagcagtacctggatgttgtgggctaccccttcatgcctccttattggggcctgggcttccacctgtgcagatggggatacagcagcacagccatcaccagacaggttgtggaaaacatgaccagagcacacttcccactggatgtgcagtggaatgacctggactacatggacagcagaagggacttcaccttcaacaaggatggcttcagagacttccctgccatggtgcaagagctgcaccaaggtggtagaagatatatgatgattgtggacccagccatcagctcctctggaccagctggcagctacagaccctatgatgagggactgagaagaggggtgttcatcaccaatgagacaggccagcctctgattggcaaagtgtggccaggctccacagcctttccagatttcacaaaccccacagctctggcttggtgggaagatatggtggcagagttccatgatcaggtgccctttgatggcatgtggattgacatgaatgagcccagcaacttcatcaggggctctgaggatggatgccccaacaatgaactggaaaatcctccttatgtgcctggtgttgttggagggacactgcaggcagccacaatttgtgccagctctcaccagtttctgagcacccactacaacctgcacaatctgtatggcctgactgaggccattgccagccacagggctcttgtgaaggctagaggcaccagaccttttgtgatcagcaggtccacctttgctggccatggcagatatgctggccactggactggggatgtgtggtctagttgggagcagctggctagctctgtgcctgagatcctgcagttcaacctgctgggagtgccccttgttggagcagatgtgtgtggcttcctgggcaacacctcagaggaactgtgtgtcagatggactcagctgggagcattctaccctttcatgagaaaccacaacagcctgctgagcctgcctcaagagccttacagcttttctgagccagcacagcaggccatgagaaaggccctgactctgagatatgccctgctgcctcacctgtacaccctgttccatcaggctcatgtggctggggagactgtggctagacccctgttcctggaattccccaaggacagctccacctggacagtggatcatcagctgctgtggggagaagccctgctgattacacctgtgctgcaggctggcaaggctgaagtgacaggctacttccctcttggcacttggtatgacctgcagacagtgcctgtggaagctctgggatctctgcctccacctcctgctgctcctagagagcctgccattcactctgaaggccagtgggttaccctgcctgctccactggataccatcaatgtgcatctgagagcaggctacatcatccctctgcaaggccctggcctgaccaccacagaatctagacagcagccaatggcactggctgtggccctgaccaaaggtggagaagctagaggggagctgttctgggatgatggggagagcctggaagtgctggaaagaggggcctatacacaagtgatttttctggctaggaacaataccattgtgaatgagcttgtcagagtcacctctgaaggtgctggcctgcagctccagaaagtgacagtgcttggagtggccacagcaccccagcaagtgctgtctaatggggtgccagtgtccaacttcacatacagccctgataccaaggtcctggacatctgtgtgtccctgcttatgggagagcagttcctggtgtcttggtgctaataatcagccataccacatttgtagaggttttacttgctttaaaaaacctcccacacctccccctgaacctgaaacataaaatgaatgcaattgttgttgttaacttgtttattgcagcttataatggttacaaataaagcaatagcatcacaaatttcacaaataaagcatttttttcactgcattctagttgtggtttgtccaaactcatcaatgtatcttatcatgtcagatctaggaacccctagtgatggagttggccactccctctctgcgcgctcgctcgctcactgaggccgggcgaccaaaggtcgcccgacgcccgggctttgcccgggcggcctcagtgagcgagcgagcgcgcag

SEQ ID NO: 673 - DNA, 4014 bp, synthetic construct
  source 1..4014: mol_type = other DNA
ctgcgcgctcgctcgctcactgaggccgcccgggcaaagcccgggcgtcgggcgacctttggtcgcccggcctcagtgagcgagcgagcgcgcagagagggagtggccaactccatcactaggggttcctagatctcttaggtcagtgaagagaagaacaaaaagcagcatattacagttagttgtcttcatcaatctttaaatatgttgtgtggtttttctctccctgtttccacagttgacatccagatgacccagagccccagcagcctgtctgcctctgtgggtgacagggtgaccattacctgcagagccagccaaagcatcagcagctacctgaactggtaccagcagaagccaggcaaggcccctaagctgctgatctatgctgccagcagcctgcaatctggagtgcctagcagattcagtggctctggctcaggcacagacttcaccctgaccatctccagcctccagcctgaggattttgccacctactactgccagcagagctacagcaccccccctatcacctttggccagggcaccagactggaaatcaagggaggaggaggctctggaggaggaggctctggagggggaggctctgaggtgcagctggtggagtctgggggaggcctggtgcagcctggaggctccctgaggctgagctgtgctgcctcaggcttcaccttcaacatctttgaaatgaactgggtcagacaggcccctggcaaaggcctggaatggatcagctacatcagcagcagaggcacaacaacatactatgctgactctgtgagaggcaggttcacaatcagcagagacaatgccaagaacagcctgtacctgcagatgaacagcctgagagcagaggatacagctgtgtactactgtgccagagactatgaggccaccatcccctttgatttctggggccagggcaccctggttacagtgtccagtggtgggggtggctctgggggtggaggcagtgcccatcctggcagacctagagctgtgcccacacagtgtgatgtgcctccaaacagcagatttgactgtgcccctgacaaggccatcacacaagagcagtgtgaagccagaggctgctgttacatccctgccaagcaaggactgcaaggggctcagatgggacagccctggtgcttcttcccaccatcttaccccagctacaagctggaaaacctgagcagctctgagatgggctacactgctacactgaccagaaccacacctacattcttcccaaaggacatcctgacactgaggctggatgtgatgatggaaacagagaacaggctgcacttcaccatcaaggaccctgccaatagaagatatgaggtgcccctggaaacccctcatgtgcactctagagccccatctccactgtactctgtggaattttctgaggaaccctttggggtcatagtcagaaggcagctggatggcagagtgctgctgaacacaactgtggcccctctgttctttgctgatcagttcctgcagctgagcaccagcctgcctagccagtatatcacaggcctggcagagcacctgtctccactgatgctgagcacatcctggaccagaatcaccctgtggaacagagacctggctcccacacctggggccaacctgtatggctctcaccccttctatctggccctggaagatggtggttcagcccatggtgtctttctgctgaactccaatgccatggatgtggtgctgcagccctctcctgctctgtcttggagaagcactggtggcatcctggatgtgtacatctttctgggccctgagcctaagtctgtggtgcagcagtacctggatgttgtgggctaccccttcatgcctccttattggggcctgggcttccacctgtgcagatggggatacagcagcacagccatcaccagacaggttgtggaaaacatgaccagagcacacttcccactggatgtgcagtggaatgacctggactacatggacagcagaagggacttcaccttcaacaaggatggcttcagagacttccctgccatggtgcaagagctgcaccaaggtggtagaagatatatgatgattgtggacccagccatcagctcctctggaccagctggcagctacagaccctatgatgagggactgagaagaggggtgttcatcaccaatgagacaggccagcctctgattggcaaagtgtggccaggctccacagcctttccagatttcacaaaccccacagctctggcttggtgggaagatatggtggcagagttccatgatcaggtgccctttgatggcatgtggattgacatgaatgagcccagcaacttcatcaggggctctgaggatggatgccccaacaatgaactggaaaatcctccttatgtgcctggtgttgttggagggacactgcaggcagccacaatttgtgccagctctcaccagtttctgagcacccactacaacctgcacaatctgtatggcctgactgaggccattgccagccacagggctcttgtgaaggctagaggcaccagaccttttgtgatcagcaggtccacctttgctggccatggcagatatgctggccactggactggggatgtgtggtctagttgggagcagctggctagctctgtgcctgagatcctgcagttcaacctgctgggagtgccccttgttggagcagatgtgtgtggcttcctgggcaacacctcagaggaactgtgtgtcagatggactcagctgggagcattctaccctttcatgagaaaccacaacagcctgctgagcctgcctcaagagccttacagcttttctgagccagcacagcaggccatgagaaaggccctgactctgagatatgccctgctgcctcacctgtacaccctgttccatcaggctcatgtggctggggagactgtggctagacccctgttcctggaattccccaaggacagctccacctggacagtggatcatcagctgctgtggggagaagccctgctgattacacctgtgctgcaggctggcaaggctgaagtgacaggctacttccctcttggcacttggtatgacctgcagacagtgcctgtggaagctctgggatctctgcctccacctcctgctgctcctagagagcctgccattcactctgaaggccagtgggttaccctgcctgctccactggataccatcaatgtgcatctgagagcaggctacatcatccctctgcaaggccctggcctgaccaccacagaatctagacagcagccaatggcactggctgtggccctgaccaaaggtggagaagctagaggggagctgttctgggatgatggggagagcctggaagtgctggaaagaggggcctatacacaagtgatttttctggctaggaacaataccattgtgaatgagcttgtcagagtcacctctgaaggtgctggcctgcagctccagaaagtgacagtgcttggagtggccacagcaccccagcaagtgctgtctaatggggtgccagtgtccaacttcacatacagccctgataccaaggtcctggacatctgtgtgtccctgcttatgggagagcagttcctggtgtcttggtgctaataatcagccataccacatttgtagaggttttacttgctttaaaaaacctcccacacctccccctgaacctgaaacataaaatgaatgcaattgttgttgttaacttgtttattgcagcttataatggttacaaataaagcaatagcatcacaaatttcacaaataaagcatttttttcactgcattctagttgtggtttgtccaaactcatcaatgtatcttatcatgtcagatctaggaacccctagtgatggagttggccactccctctctgcgcgctcgctcgctcactgaggccgggcgaccaaaggtcgcccgacgcccgggctttgcccgggcggcctcagtgagcgagcgagcgcgcag

SEQ ID NO: 674 - DNA, 4014 bp, synthetic construct
  source 1..4014: mol_type = other DNA
ctgcgcgctcgctcgctcactgaggccgcccgggcaaagcccgggcgtcgggcgacctttggtcgcccggcctcagtgagcgagcgagcgcgcagagagggagtggccaactccatcactaggggttcctagatctcttaggtcagtgaagagaagaacaaaaagcagcatattacagttagttgtcttcatcaatctttaaatatgttgtgtggtttttctctccctgtttccacagttgatatccaaatgacccagagccccagctccctgtcagcctctgtgggagacagagtgaccatcacatgcagagccagccagagcatcagcagctacctgaactggtaccagcagaagcctggcaaggcccccaagctgctgatctatgctgccagcagcctgcagtctggagtgccttccagattctctggctcaggcagtggcacagacttcaccctgacaatcagcagcctgcagcctgaagactttgccacctactactgccagcagagctacagcacaccacctatcacctttggccagggcaccagactggagatcaaagggggtgggggctctggggggggaggcagtggaggaggtggctctgaagtccagctggtggagtctggaggaggcctggtgcagcctggaggcagcctgaggctgtcctgtgcagcctctggcttcaccttcaacatctttgagatgaactgggttaggcaggcccctggcaagggcctggaatggatcagctacattagcagcagaggcaccacaacctactatgctgactctgtgaggggcagattcaccatcagcagagataatgccaagaacagcctgtacctgcagatgaacagcctcagagctgaggacacagctgtgtactactgtgccagagattatgaggccaccatcccctttgacttctggggccaaggcaccctggtgacagtgtcttctggaggtggaggctctggaggaggtggcagtgcccatcctggcagacctagagctgtgcccacacagtgtgatgtgcctccaaacagcagatttgactgtgcccctgacaaggccatcacacaagagcagtgtgaagccagaggctgctgttacatccctgccaagcaaggactgcaaggggctcagatgggacagccctggtgcttcttcccaccatcttaccccagctacaagctggaaaacctgagcagctctgagatgggctacactgctacactgaccagaaccacacctacattcttcccaaaggacatcctgacactgaggctggatgtgatgatggaaacagagaacaggctgcacttcaccatcaaggaccctgccaatagaagatatgaggtgcccctggaaacccctcatgtgcactctagagccccatctccactgtactctgtggaattttctgaggaaccctttggggtcatagtcagaaggcagctggatggcagagtgctgctgaacacaactgtggcccctctgttctttgctgatcagttcctgcagctgagcaccagcctgcctagccagtatatcacaggcctggcagagcacctgtctccactgatgctgagcacatcctggaccagaatcaccctgtggaacagagacctggctcccacacctggggccaacctgtatggctctcaccccttctatctggccctggaagatggtggttcagcccatggtgtctttctgctgaactccaatgccatggatgtggtgctgcagccctctcctgctctgtcttggagaagcactggtggcatcctggatgtgtacatctttctgggccctgagcctaagtctgtggtgcagcagtacctggatgttgtgggctaccccttcatgcctccttattggggcctgggcttccacctgtgcagatggggatacagcagcacagccatcaccagacaggttgtggaaaacatgaccagagcacacttcccactggatgtgcagtggaatgacctggactacatggacagcagaagggacttcaccttcaacaaggatggcttcagagacttccctgccatggtgcaagagctgcaccaaggtggtagaagatatatgatgattgtggacccagccatcagctcctctggaccagctggcagctacagaccctatgatgagggactgagaagaggggtgttcatcaccaatgagacaggccagcctctgattggcaaagtgtggccaggctccacagcctttccagatttcacaaaccccacagctctggcttggtgggaagatatggtggcagagttccatgatcaggtgccctttgatggcatgtggattgacatgaatgagcccagcaacttcatcaggggctctgaggatggatgccccaacaatgaactggaaaatcctccttatgtgcctggtgttgttggagggacactgcaggcagccacaatttgtgccagctctcaccagtttctgagcacccactacaacctgcacaatctgtatggcctgactgaggccattgccagccacagggctcttgtgaaggctagaggcaccagaccttttgtgatcagcaggtccacctttgctggccatggcagatatgctggccactggactggggatgtgtggtctagttgggagcagctggctagctctgtgcctgagatcctgcagttcaacctgctgggagtgccccttgttggagcagatgtgtgtggcttcctgggcaacacctcagaggaactgtgtgtcagatggactcagctgggagcattctaccctttcatgagaaaccacaacagcctgctgagcctgcctcaagagccttacagcttttctgagccagcacagcaggccatgagaaaggccctgactctgagatatgccctgctgcctcacctgtacaccctgttccatcaggctcatgtggctggggagactgtggctagacccctgttcctggaattccccaaggacagctccacctggacagtggatcatcagctgctgtggggagaagccctgctgattacacctgtgctgcaggctggcaaggctgaagtgacaggctacttccctcttggcacttggtatgacctgcagacagtgcctgtggaagctctgggatctctgcctccacctcctgctgctcctagagagcctgccattcactctgaaggccagtgggttaccctgcctgctccactggataccatcaatgtgcatctgagagcaggctacatcatccctctgcaaggccctggcctgaccaccacagaatctagacagcagccaatggcactggctgtggccctgaccaaaggtggagaagctagaggggagctgttctgggatgatggggagagcctggaagtgctggaaagaggggcctatacacaagtgatttttctggctaggaacaataccattgtgaatgagcttgtcagagtcacctctgaaggtgctggcctgcagctccagaaagtgacagtgcttggagtggccacagcaccccagcaagtgctgtctaatggggtgccagtgtccaacttcacatacagccctgataccaaggtcctggacatctgtgtgtccctgcttatgggagagcagttcctggtgtcttggtgctaataatcagccataccacatttgtagaggttttacttgctttaaaaaacctcccacacctccccctgaacctgaaacataaaatgaatgcaattgttgttgttaacttgtttattgcagcttataatggttacaaataaagcaatagcatcacaaatttcacaaataaagcatttttttcactgcattctagttgtggtttgtccaaactcatcaatgtatcttatcatgtcagatctaggaacccctagtgatggagttggccactccctctctgcgcgctcgctcgctcactgaggccgggcgaccaaaggtcgcccgacgcccgggctttgcccgggcggcctcagtgagcgagcgagcgcgcag

SEQ ID NO: 675 - DNA, 4020 bp, synthetic construct
  source 1..4020: mol_type = other DNA
ctgcgcgctcgctcgctcactgaggccgcccgggcaaagcccgggcgtcgggcgacctttggtcgcccggcctcagtgagcgagcgagcgcgcagagagggagtggccaactccatcactaggggttcctagatctcttaggtcagtgaagagaagaacaaaaagcagcatattacagttagttgtcttcatcaatctttaaatatgttgtgtggtttttctctccctgtttccacagttgacatccagatgacccagtctccatcctccctgtctgcatctgtaggagacagagtcaccatcacttgccgggcaagtcagagcattagcagctatttaaattggtatcagcagaaaccagggaaagcccctaagctcctgatctatgctgcatccagtttgcaaagtggggtcccgtcaaggttcagtggcagtggatctgggacagatttcactctcaccatcagcagtctgcaacctgaagattttgcaacttactactgtcaacagagttacagtacccctccgatcaccttcggccaagggacacgactggagattaaaggcggcggcggaagcggagggggaggatcaggaggaggcggatccgaagtgcagctggtggagtctgggggaggcttggttcagcctggcaggtccctgagactctcctgtgcagcctctggattcacctttgatgattatgccatgaactgggtccggcaagctccagggaagggcctggagtgggtctcaggtattagttggagtagtggtagcatggactatgcggactctgtgaagggccgattcaccatctccagagacaacgccaaaaactccctgtatctgcaaatgaacagtctgagaactgaggacacggccttatattactgtgcaaaagctagggaagttggagactactacggtatggacgtctggggccaagggaccacggtcaccgtctcctcaggaggtggtggaagtggaggtggtggaagtgcacaccccggccgtcccagagcagtgcccacacagtgcgacgtcccccccaacagccgcttcgattgcgcccctgacaaggccatcacccaggaacagtgcgaggcccgcggctgttgctacatccctgcaaagcaggggctgcagggagcccagatggggcagccctggtgcttcttcccacccagctaccccagctacaagctggagaacctgagctcctctgaaatgggctacacggccaccctgacccgtaccacccccaccttcttccccaaggacatcctgaccctgcggctggacgtgatgatggagactgagaaccgcctccacttcacgatcaaagatccagctaacaggcgctacgaggtgcccttggagaccccgcatgtccacagccgggcaccgtccccactctacagcgtggagttctccgaggagcccttcggggtgatcgtgcgccggcagctggacggccgcgtgctgctgaacacgacggtggcgcccctgttctttgcggaccagttccttcagctgtccacctcgctgccctcgcagtatatcacaggcctcgccgagcacctcagtcccctgatgctcagcaccagctggaccaggatcaccctgtggaaccgggaccttgcgcccacgcccggtgcgaacctctacgggtctcaccctttctacctggcgctggaggacggcgggtcggcacacggggtgttcctgctaaacagcaatgccatggatgtggtcctgcagccgagccctgcccttagctggaggtcgacaggtgggatcctggatgtctacatcttcctgggcccagagcccaagagcgtggtgcagcagtacctggacgttgtgggatacccgttcatgccgccatactggggcctgggcttccacctgtgccgctggggctactcctccaccgctatcacccgccaggtggtggagaacatgaccagggcccacttccccctggacgtccagtggaacgacctggactacatggactcccggagggacttcacgttcaacaaggatggcttccgggacttcccggccatggtgcaggagctgcaccagggcggccggcgctacatgatgatcgtggatcctgccatcagcagctcgggccctgccgggagctacaggccctacgacgagggtctgcggaggggggttttcatcaccaacgagaccggccagccgctgattgggaaggtatggcccgggtccactgccttccccgacttcaccaaccccacagccctggcctggtgggaggacatggtggctgagttccatgaccaggtgcccttcgacggcatgtggattgacatgaacgagccttccaacttcatcaggggctctgaggacggctgccccaacaatgagctggagaacccaccctacgtgcctggggtggttggggggaccctccaggcggccaccatctgtgcctccagccaccagtttctctccacacactacaacctgcacaacctctacggcctgaccgaagccatcgcctcccacagggcgctggtgaaggctcgggggacacgcccatttgtgatctcccgctcgacctttgctggccacggccgatacgccggccactggacgggggacgtgtggagctcctgggagcagctcgcctcctccgtgccagaaatcctgcagtttaacctgctgggggtgcctctggtcggggccgacgtctgcggcttcctgggcaacacctcagaggagctgtgtgtgcgctggacccagctgggggccttctaccccttcatgcggaaccacaacagcctgctcagtctgccccaggagccgtacagcttcagcgagccggcccagcaggccatgaggaaggccctcaccctgcgctacgcactcctcccccacctctacacactgttccaccaggcccacgtcgcgggggagaccgtggcccggcccctcttcctggagttccccaaggactctagcacctggactgtggaccaccagctcctgtggggggaggccctgctcatcaccccagtgctccaggccgggaaggccgaagtgactggctacttccccttgggcacatggtacgacctgcagacggtgccagtagaggcccttggcagcctcccacccccacctgcagctccccgtgagccagccatccacagcgaggggcagtgggtgacgctgccggcccccctggacaccatcaacgtccacctccgggctgggtacatcatccccctgcagggccctggcctcacaaccacagagtcccgccagcagcccatggccctggctgtggccctgaccaagggtggggaggcccgaggggagctgttctgggacgatggagagagcctggaagtgctggagcgaggggcctacacacaggtcatcttcctggccaggaataacacgatcgtgaatgagctggtacgtgtgaccagtgagggagctggcctgcagctgcagaaggtgactgtcctgggcgtggccacggcgccccagcaggtcctctccaacggtgtccctgtctccaacttcacctacagccccgacaccaaggtcctggacatctgtgtctcgctgttgatgggagagcagtttctcgtcagctggtgttaataatcagccataccacatttgtagaggttttacttgctttaaaaaacctcccacacctccccctgaacctgaaacataaaatgaatgcaattgttgttgttaacttgtttattgcagcttataatggttacaaataaagcaatagcatcacaaatttcacaaataaagcatttttttcactgcattctagttgtggtttgtccaaactcatcaatgtatcttatcatgtcagatctaggaacccctagtgatggagttggccactccctctctgcgcgctcgctcgctcactgaggccgggcgaccaaaggtcgcccgacgcccgggctttgcccgggcggcctcagtgagcgagcgagcgcgcag

SEQ ID NO: 676 - DNA, 4020 bp, synthetic construct
  source 1..4020: mol_type = other DNA
ctgcgcgctcgctcgctcactgaggccgcccgggcaaagcccgggcgtcgggcgacctttggtcgcccggcctcagtgagcgagcgagcgcgcagagagggagtggccaactccatcactaggggttcctagatctcttaggtcagtgaagagaagaacaaaaagcagcatattacagttagttgtcttcatcaatctttaaatatgttgtgtggtttttctctccctgtttccacagttgacatccagatgacacagagcccctctagcctgtctgcctctgtgggagacagagtgaccatcacctgtagagccagccagagcatcagcagctacctgaactggtatcagcagaagcctggcaaggcccctaaactgctgatctatgctgccagcagcctgcagtctggggtgccctctagattttctggcagtggctctggcacagacttcaccctgaccataagctccctgcagcctgaggactttgccacctactactgtcagcagagctacagcacccctcctatcacctttggccagggcaccagactggaaatcaaaggtggtggtggaagtggtggtggtggcagtggtggtggtggatctgaagtgcagctggtggaaagtggtggtggcctggttcagcctggcagatccctgagactgagctgtgcagcctctggctttacctttgatgactatgccatgaactgggtcagacaggccccaggcaaaggcctggaatgggtgtcaggcatctcttggtcctctggctccatggactatgctgactctgtgaagggcagattcaccatcagcagagacaatgccaagaacagcctgtacctgcagatgaactccctgagaacagaggacacagccctgtactactgtgccaaggccagagaagtgggagactactatggcatggatgtgtggggccagggaaccacagtgacagtcagtagtggtggtggtggcagtggtggtggtggttctgcccatcctggcagacctagagctgtgcccacacagtgtgatgtgcctccaaacagcagatttgactgtgcccctgacaaggccatcacacaagagcagtgtgaagccagaggctgctgttacatccctgccaagcaaggactgcaaggggctcagatgggacagccctggtgcttcttcccaccatcttaccccagctacaagctggaaaacctgagcagctctgagatgggctacactgctacactgaccagaaccacacctacattcttcccaaaggacatcctgacactgaggctggatgtgatgatggaaacagagaacaggctgcacttcaccatcaaggaccctgccaatagaagatatgaggtgcccctggaaacccctcatgtgcactctagagccccatctccactgtactctgtggaattttctgaggaaccctttggggtcatagtcagaaggcagctggatggcagagtgctgctgaacacaactgtggcccctctgttctttgctgatcagttcctgcagctgagcaccagcctgcctagccagtatatcacaggcctggcagagcacctgtctccactgatgctgagcacatcctggaccagaatcaccctgtggaacagagacctggctcccacacctggggccaacctgtatggctctcaccccttctatctggccctggaagatggtggttcagcccatggtgtctttctgctgaactccaatgccatggatgtggtgctgcagccctctcctgctctgtcttggagaagcactggtggcatcctggatgtgtacatctttctgggccctgagcctaagtctgtggtgcagcagtacctggatgttgtgggctaccccttcatgcctccttattggggcctgggcttccacctgtgcagatggggatacagcagcacagccatcaccagacaggttgtggaaaacatgaccagagcacacttcccactggatgtgcagtggaatgacctggactacatggacagcagaagggacttcaccttcaacaaggatggcttcagagacttccctgccatggtgcaagagctgcaccaaggtggtagaagatatatgatgattgtggacccagccatcagctcctctggaccagctggcagctacagaccctatgatgagggactgagaagaggggtgttcatcaccaatgagacaggccagcctctgattggcaaagtgtggccaggctccacagcctttccagatttcacaaaccccacagctctggcttggtgggaagatatggtggcagagttccatgatcaggtgccctttgatggcatgtggattgacatgaatgagcccagcaacttcatcaggggctctgaggatggatgccccaacaatgaactggaaaatcctccttatgtgcctggtgttgttggagggacactgcaggcagccacaatttgtgccagctctcaccagtttctgagcacccactacaacctgcacaatctgtatggcctgactgaggccattgccagccacagggctcttgtgaaggctagaggcaccagaccttttgtgatcagcaggtccacctttgctggccatggcagatatgctggccactggactggggatgtgtggtctagttgggagcagctggctagctctgtgcctgagatcctgcagttcaacctgctgggagtgccccttgttggagcagatgtgtgtggcttcctgggcaacacctcagaggaactgtgtgtcagatggactcagctgggagcattctaccctttcatgagaaaccacaacagcctgctgagcctgcctcaagagccttacagcttttctgagccagcacagcaggccatgagaaaggccctgactctgagatatgccctgctgcctcacctgtacaccctgttccatcaggctcatgtggctggggagactgtggctagacccctgttcctggaattccccaaggacagctccacctggacagtggatcatcagctgctgtggggagaagccctgctgattacacctgtgctgcaggctggcaaggctgaagtgacaggctacttccctcttggcacttggtatgacctgcagacagtgcctgtggaagctctgggatctctgcctccacctcctgctgctcctagagagcctgccattcactctgaaggccagtgggttaccctgcctgctccactggataccatcaatgtgcatctgagagcaggctacatcatccctctgcaaggccctggcctgaccaccacagaatctagacagcagccaatggcactggctgtggccctgaccaaaggtggagaagctagaggggagctgttctgggatgatggggagagcctggaagtgctggaaagaggggcctatacacaagtgatttttctggctaggaacaataccattgtgaatgagcttgtcagagtcacctctgaaggtgctggcctgcagctccagaaagtgacagtgcttggagtggccacagcaccccagcaagtgctgtctaatggggtgccagtgtccaacttcacatacagccctgataccaaggtcctggacatctgtgtgtccctgcttatgggagagcagttcctggtgtcttggtgctaataatcagccataccacatttgtagaggttttacttgctttaaaaaacctcccacacctccccctgaacctgaaacataaaatgaatgcaattgttgttgttaacttgtttattgcagcttataatggttacaaataaagcaatagcatcacaaatttcacaaataaagcatttttttcactgcattctagttgtggtttgtccaaactcatcaatgtatcttatcatgtcagatctaggaacccctagtgatggagttggccactccctctctgcgcgctcgctcgctcactgaggccgggcgaccaaaggtcgcccgacgcccgggctttgcccgggcggcctcagtgagcgagcgagcgcgcag

SEQ ID NO: 677 - DNA, 4020 bp, synthetic construct
  source 1..4020: mol_type = other DNA
ctgcgcgctcgctcgctcactgaggccgcccgggcaaagcccgggcgtcgggcgacctttggtcgcccggcctcagtgagcgagcgagcgcgcagagagggagtggccaactccatcactaggggttcctagatctcttaggtcagtgaagagaagaacaaaaagcagcatattacagttagttgtcttcatcaatctttaaatatgttgtgtggtttttctctccctgtttccacagttgatatccagatgacccagagccccagcagcctgtctgccagtgtgggggatagagtgaccatcacctgcagggccagccagagcatcagcagctacctcaactggtaccagcaaaagcctggcaaggcccccaaactgctgatttatgctgccagcagcctgcagtctggggtcccttccagattctctggctctggctctggcacagacttcaccctgaccatcagcagcctgcagccagaggactttgccacatactactgccagcagagctacagcaccccccctatcacctttggccagggcaccaggctggagatcaagggaggtgggggctcaggaggaggtggctctggaggaggaggctcagaggtgcagctggttgagagtggaggaggcctggtgcagcctggcagaagcctgagactgagctgtgctgcctctggcttcacctttgatgactatgccatgaactgggtgagacaggcccctggcaagggcctggaatgggtgtctggcatctcctggagctctggcagcatggactatgctgactctgtgaagggcaggttcaccatcagcagagacaatgccaagaacagcctgtacctgcagatgaacagcctgagaacagaagacacagccctgtactactgtgcaaaagccagagaagtgggagactactatggcatggatgtgtggggccaaggcaccacagtgacagtgagcagtggtggaggtggctcagggggaggaggcagtgcccatcctggcagacctagagctgtgcccacacagtgtgatgtgcctccaaacagcagatttgactgtgcccctgacaaggccatcacacaagagcagtgtgaagccagaggctgctgttacatccctgccaagcaaggactgcaaggggctcagatgggacagccctggtgcttcttcccaccatcttaccccagctacaagctggaaaacctgagcagctctgagatgggctacactgctacactgaccagaaccacacctacattcttcccaaaggacatcctgacactgaggctggatgtgatgatggaaacagagaacaggctgcacttcaccatcaaggaccctgccaatagaagatatgaggtgcccctggaaacccctcatgtgcactctagagccccatctccactgtactctgtggaattttctgaggaaccctttggggtcatagtcagaaggcagctggatggcagagtgctgctgaacacaactgtggcccctctgttctttgctgatcagttcctgcagctgagcaccagcctgcctagccagtatatcacaggcctggcagagcacctgtctccactgatgctgagcacatcctggaccagaatcaccctgtggaacagagacctggctcccacacctggggccaacctgtatggctctcaccccttctatctggccctggaagatggtggttcagcccatggtgtctttctgctgaactccaatgccatggatgtggtgctgcagccctctcctgctctgtcttggagaagcactggtggcatcctggatgtgtacatctttctgggccctgagcctaagtctgtggtgcagcagtacctggatgttgtgggctaccccttcatgcctccttattggggcctgggcttccacctgtgcagatggggatacagcagcacagccatcaccagacaggttgtggaaaacatgaccagagcacacttcccactggatgtgcagtggaatgacctggactacatggacagcagaagggacttcaccttcaacaaggatggcttcagagacttccctgccatggtgcaagagctgcaccaaggtggtagaagatatatgatgattgtggacccagccatcagctcctctggaccagctggcagctacagaccctatgatgagggactgagaagaggggtgttcatcaccaatgagacaggccagcctctgattggcaaagtgtggccaggctccacagcctttccagatttcacaaaccccacagctctggcttggtgggaagatatggtggcagagttccatgatcaggtgccctttgatggcatgtggattgacatgaatgagcccagcaacttcatcaggggctctgaggatggatgccccaacaatgaactggaaaatcctccttatgtgcctggtgttgttggagggacactgcaggcagccacaatttgtgccagctctcaccagtttctgagcacccactacaacctgcacaatctgtatggcctgactgaggccattgccagccacagggctcttgtgaaggctagaggcaccagaccttttgtgatcagcaggtccacctttgctggccatggcagatatgctggccactggactggggatgtgtggtctagttgggagcagctggctagctctgtgcctgagatcctgcagttcaacctgctgggagtgccccttgttggagcagatgtgtgtggcttcctgggcaacacctcagaggaactgtgtgtcagatggactcagctgggagcattctaccctttcatgagaaaccacaacagcctgctgagcctgcctcaagagccttacagcttttctgagccagcacagcaggccatgagaaaggccctgactctgagatatgccctgctgcctcacctgtacaccctgttccatcaggctcatgtggctggggagactgtggctagacccctgttcctggaattccccaaggacagctccacctggacagtggatcatcagctgctgtggggagaagccctgctgattacacctgtgctgcaggctggcaaggctgaagtgacaggctacttccctcttggcacttggtatgacctgcagacagtgcctgtggaagctctgggatctctgcctccacctcctgctgctcctagagagcctgccattcactctgaaggccagtgggttaccctgcctgctccactggataccatcaatgtgcatctgagagcaggctacatcatccctctgcaaggccctggcctgaccaccacagaatctagacagcagccaatggcactggctgtggccctgaccaaaggtggagaagctagaggggagctgttctgggatgatggggagagcctggaagtgctggaaagaggggcctatacacaagtgatttttctggctaggaacaataccattgtgaatgagcttgtcagagtcacctctgaaggtgctggcctgcagctccagaaagtgacagtgcttggagtggccacagcaccccagcaagtgctgtctaatggggtgccagtgtccaacttcacatacagccctgataccaaggtcctggacatctgtgtgtccctgcttatgggagagcagttcctggtgtcttggtgctaataatcagccataccacatttgtagaggttttacttgctttaaaaaacctcccacacctccccctgaacctgaaacataaaatgaatgcaattgttgttgttaacttgtttattgcagcttataatggttacaaataaagcaatagcatcacaaatttcacaaataaagcatttttttcactgcattctagttgtggtttgtccaaactcatcaatgtatcttatcatgtcagatctaggaacccctagtgatggagttggccactccctctctgcgcgctcgctcgctcactgaggccgggcgaccaaaggtcgcccgacgcccgggctttgcccgggcggcctcagtgagcgagcgagcgcgcag

SEQ ID NO: 678 - DNA, 4020 bp, synthetic construct
  source 1..4020: mol_type = other DNA
ctgcgcgctcgctcgctcactgaggccgcccgggcaaagcccgggcgtcgggcgacctttggtcgcccggcctcagtgagcgagcgagcgcgcagagagggagtggccaactccatcactaggggttcctagatctcttaggtcagtgaagagaagaacaaaaagcagcatattacagttagttgtcttcatcaatctttaaatatgttgtgtggtttttctctccctgtttccacagttgacatccagatgacccagagccccagctccctgtcagccagtgtgggtgacagagtgaccatcacctgcagagccagccagagcatcagcagctacctgaactggtaccagcagaaacctggcaaagcccccaagctgctgatttatgctgctagcagcctgcagagtggagtgcccagcagattctcaggcagtggctctggcacagacttcaccctgaccatctccagcctgcagccagaagactttgccacctactactgccagcagagctacagcacccctcctatcacctttggccagggcacaagactggagatcaagggaggaggaggctctggaggaggaggctctggagggggaggctctgaggtccaactggttgaatctggagggggcctggtgcaacctggcaggagcctgagactgagctgtgctgcctctggcttcacctttgatgactatgccatgaactgggtgagacaggcccctggcaagggcctggagtgggtgtctggcatcagctggagctctggcagcatggactatgcagattctgtgaagggcaggttcaccatcagcagagataatgccaagaacagcctgtacctgcagatgaacagcctcaggacagaggacacagccctgtactactgtgccaaggccagagaagtgggtgactactatggcatggatgtgtggggccagggcaccacagtgacagtgagctctgggggaggaggctcaggtgggggtggcagtgcccatcctggcagacctagagctgtgcccacacagtgtgatgtgcctccaaacagcagatttgactgtgcccctgacaaggccatcacacaagagcagtgtgaagccagaggctgctgttacatccctgccaagcaaggactgcaaggggctcagatgggacagccctggtgcttcttcccaccatcttaccccagctacaagctggaaaacctgagcagctctgagatgggctacactgctacactgaccagaaccacacctacattcttcccaaaggacatcctgacactgaggctggatgtgatgatggaaacagagaacaggctgcacttcaccatcaaggaccctgccaatagaagatatgaggtgcccctggaaacccctcatgtgcactctagagccccatctccactgtactctgtggaattttctgaggaaccctttggggtcatagtcagaaggcagctggatggcagagtgctgctgaacacaactgtggcccctctgttctttgctgatcagttcctgcagctgagcaccagcctgcctagccagtatatcacaggcctggcagagcacctgtctccactgatgctgagcacatcctggaccagaatcaccctgtggaacagagacctggctcccacacctggggccaacctgtatggctctcaccccttctatctggccctggaagatggtggttcagcccatggtgtctttctgctgaactccaatgccatggatgtggtgctgcagccctctcctgctctgtcttggagaagcactggtggcatcctggatgtgtacatctttctgggccctgagcctaagtctgtggtgcagcagtacctggatgttgtgggctaccccttcatgcctccttattggggcctgggcttccacctgtgcagatggggatacagcagcacagccatcaccagacaggttgtggaaaacatgaccagagcacacttcccactggatgtgcagtggaatgacctggactacatggacagcagaagggacttcaccttcaacaaggatggcttcagagacttccctgccatggtgcaagagctgcaccaaggtggtagaagatatatgatgattgtggacccagccatcagctcctctggaccagctggcagctacagaccctatgatgagggactgagaagaggggtgttcatcaccaatgagacaggccagcctctgattggcaaagtgtggccaggctccacagcctttccagatttcacaaaccccacagctctggcttggtgggaagatatggtggcagagttccatgatcaggtgccctttgatggcatgtggattgacatgaatgagcccagcaacttcatcaggggctctgaggatggatgccccaacaatgaactggaaaatcctccttatgtgcctggtgttgttggagggacactgcaggcagccacaatttgtgccagctctcaccagtttctgagcacccactacaacctgcacaatctgtatggcctgactgaggccattgccagccacagggctcttgtgaaggctagaggcaccagaccttttgtgatcagcaggtccacctttgctggccatggcagatatgctggccactggactggggatgtgtggtctagttgggagcagctggctagctctgtgcctgagatcctgcagttcaacctgctgggagtgccccttgttggagcagatgtgtgtggcttcctgggcaacacctcagaggaactgtgtgtcagatggactcagctgggagcattctaccctttcatgagaaaccacaacagcctgctgagcctgcctcaagagccttacagcttttctgagccagcacagcaggccatgagaaaggccctgactctgagatatgccctgctgcctcacctgtacaccctgttccatcaggctcatgtggctggggagactgtggctagacccctgttcctggaattccccaaggacagctccacctggacagtggatcatcagctgctgtggggagaagccctgctgattacacctgtgctgcaggctggcaaggctgaagtgacaggctacttccctcttggcacttggtatgacctgcagacagtgcctgtggaagctctgggatctctgcctccacctcctgctgctcctagagagcctgccattcactctgaaggccagtgggttaccctgcctgctccactggataccatcaatgtgcatctgagagcaggctacatcatccctctgcaaggccctggcctgaccaccacagaatctagacagcagccaatggcactggctgtggccctgaccaaaggtggagaagctagaggggagctgttctgggatgatggggagagcctggaagtgctggaaagaggggcctatacacaagtgatttttctggctaggaacaataccattgtgaatgagcttgtcagagtcacctctgaaggtgctggcctgcagctccagaaagtgacagtgcttggagtggccacagcaccccagcaagtgctgtctaatggggtgccagtgtccaacttcacatacagccctgataccaaggtcctggacatctgtgtgtccctgcttatgggagagcagttcctggtgtcttggtgctaataatcagccataccacatttgtagaggttttacttgctttaaaaaacctcccacacctccccctgaacctgaaacataaaatgaatgcaattgttgttgttaacttgtttattgcagcttataatggttacaaataaagcaatagcatcacaaatttcacaaataaagcatttttttcactgcattctagttgtggtttgtccaaactcatcaatgtatcttatcatgtcagatctaggaacccctagtgatggagttggccactccctctctgcgcgctcgctcgctcactgaggccgggcgaccaaaggtcgcccgacgcccgggctttgcccgggcggcctcagtgagcgagcgagcgcgcag

SEQ ID NO: 679 - DNA, 3993 bp, synthetic construct
  source 1..3993: mol_type = other DNA
ctgcgcgctcgctcgctcactgaggccgcccgggcaaagcccgggcgtcgggcgacctttggtcgcccggcctcagtgagcgagcgagcgcgcagagagggagtggccaactccatcactaggggttcctagatctcttaggtcagtgaagagaagaacaaaaagcagcatattacagttagttgtcttcatcaatctttaaatatgttgtgtggtttttctctccctgtttccacagttcaggtccagctgcaagagtctggccccaaggtggtcaagccctctgagacactgagcctgacctgcacagtgtctggtggcagcatcagcagctactactggaactggatcagacagagccctggcaaaggcctggaatggattggctacaccaagagaggctacacagactacaaccccagcctgagaagcagagtgaccatctctgaggacaccagcaagaaccagttcagcctgaggatcagctctgtgacagctgctgacacagcagtgtactactgtgcccagatgggctggggcagccatgcctttgatatgtggggccagggcacaatggtggctgtgtccagtgggggctcaggaggaggtggctcaggaggtggaggttcaggaggggagattgtgctgacccagtctcctggcacactgtctctgagccctggggaaagagccacactgagctgtagagccagccagtctgtgtcctctagctacctggcctggtatcagcagaagcctggacaggctcccagactgctgatctatggggcctcttctagagccacaggcatccctgacagattcagtggcagtggctctggcacagacttcaccctgaccatcagcagactggaacctgaggactttgctgtgtactattgccagcagtatggcagcagcccctggacatttggacagggcaccaaggtggaaatcaaaggtggtggtggctctgcccatcctggcagacctagagctgtgcccacacagtgtgatgtgcctccaaacagcagatttgactgtgcccctgacaaggccatcacacaagagcagtgtgaagccagaggctgctgttacatccctgccaagcaaggactgcaaggggctcagatgggacagccctggtgcttcttcccaccatcttaccccagctacaagctggaaaacctgagcagctctgagatgggctacactgctacactgaccagaaccacacctacattcttcccaaaggacatcctgacactgaggctggatgtgatgatggaaacagagaacaggctgcacttcaccatcaaggaccctgccaatagaagatatgaggtgcccctggaaacccctcatgtgcactctagagccccatctccactgtactctgtggaattttctgaggaaccctttggggtcatagtcagaaggcagctggatggcagagtgctgctgaacacaactgtggcccctctgttctttgctgatcagttcctgcagctgagcaccagcctgcctagccagtatatcacaggcctggcagagcacctgtctccactgatgctgagcacatcctggaccagaatcaccctgtggaacagagacctggctcccacacctggggccaacctgtatggctctcaccccttctatctggccctggaagatggtggttcagcccatggtgtctttctgctgaactccaatgccatggatgtggtgctgcagccctctcctgctctgtcttggagaagcactggtggcatcctggatgtgtacatctttctgggccctgagcctaagtctgtggtgcagcagtacctggatgttgtgggctaccccttcatgcctccttattggggcctgggcttccacctgtgcagatggggatacagcagcacagccatcaccagacaggttgtggaaaacatgaccagagcacacttcccactggatgtgcagtggaatgacctggactacatggacagcagaagggacttcaccttcaacaaggatggcttcagagacttccctgccatggtgcaagagctgcaccaaggtggtagaagatatatgatgattgtggacccagccatcagctcctctggaccagctggcagctacagaccctatgatgagggactgagaagaggggtgttcatcaccaatgagacaggccagcctctgattggcaaagtgtggccaggctccacagcctttccagatttcacaaaccccacagctctggcttggtgggaagatatggtggcagagttccatgatcaggtgccctttgatggcatgtggattgacatgaatgagcccagcaacttcatcaggggctctgaggatggatgccccaacaatgaactggaaaatcctccttatgtgcctggtgttgttggagggacactgcaggcagccacaatttgtgccagctctcaccagtttctgagcacccactacaacctgcacaatctgtatggcctgactgaggccattgccagccacagggctcttgtgaaggctagaggcaccagaccttttgtgatcagcaggtccacctttgctggccatggcagatatgctggccactggactggggatgtgtggtctagttgggagcagctggctagctctgtgcctgagatcctgcagttcaacctgctgggagtgccccttgttggagcagatgtgtgtggcttcctgggcaacacctcagaggaactgtgtgtcagatggactcagctgggagcattctaccctttcatgagaaaccacaacagcctgctgagcctgcctcaagagccttacagcttttctgagccagcacagcaggccatgagaaaggccctgactctgagatatgccctgctgcctcacctgtacaccctgttccatcaggctcatgtggctggggagactgtggctagacccctgttcctggaattccccaaggacagctccacctggacagtggatcatcagctgctgtggggagaagccctgctgattacacctgtgctgcaggctggcaaggctgaagtgacaggctacttccctcttggcacttggtatgacctgcagacagtgcctgtggaagctctgggatctctgcctccacctcctgctgctcctagagagcctgccattcactctgaaggccagtgggttaccctgcctgctccactggataccatcaatgtgcatctgagagcaggctacatcatccctctgcaaggccctggcctgaccaccacagaatctagacagcagccaatggcactggctgtggccctgaccaaaggtggagaagctagaggggagctgttctgggatgatggggagagcctggaagtgctggaaagaggggcctatacacaagtgatttttctggctaggaacaataccattgtgaatgagcttgtcagagtcacctctgaaggtgctggcctgcagctccagaaagtgacagtgcttggagtggccacagcaccccagcaagtgctgtctaatggggtgccagtgtccaacttcacatacagccctgataccaaggtcctggacatctgtgtgtccctgcttatgggagagcagttcctggtgtcttggtgctaataatcagccataccacatttgtagaggttttacttgctttaaaaaacctcccacacctccccctgaacctgaaacataaaatgaatgcaattgttgttgttaacttgtttattgcagcttataatggttacaaataaagcaatagcatcacaaatttcacaaataaagcatttttttcactgcattctagttgtggtttgtccaaactcatcaatgtatcttatcatgtcagatctaggaacccctagtgatggagttggccactccctctctgcgcgctcgctcgctcactgaggccgggcgaccaaaggtcgcccgacgcccgggctttgcccgggcggcctcagtgagcgagcgagcgcgcag

SEQ ID NO: 680 - protein, 121 aa, synthetic construct
EVQLVESGGGLVQPGGSLRLSCAASGFAFSSYAMTWVRQAPGKGLEWVSVISGTGGSTYYADSVKGRFTISRDNSKNTLYLQMNSLRAEDTAVYYCAKGGAARRMEYFQYWGQGTTVTVSS

SEQ ID NO: 681 - protein, 121 aa, synthetic construct
EVQLVESGGGLVQPGGSLRLSCAASGFTFNSYAMTWVRQAPGKGLEWVSFIGGSTGNTYYAGSVKGRFTISSDNSKKTLYLQMNSLRAEDTAVYYCAKGGAARRMEYFQHWGQGTTVTVSS

SEQ ID NO: 682 - protein, 122 aa, synthetic construct
EVQLVESGGGVVQPGRSLRLSCAASGFTFTTYGMHWVRQAPGKGLEWVAVIWYDGSNKYYGDSVKGRFTISRDNSKNTLYLQMNSLRVDDTAVYYCTRTHGYTRSSDGFDYWGQGTMVTVSS

SEQ ID NO: 683 - protein, 107 aa, synthetic construct
DIVMTQSPATLSLSPGERATLSCRASQSVSSYLAWYQQKPGQAPRLLIHDVSNRATGIPARFSGSGSGTDFTLTISSLEPEDFVVYYCQQRSDWPITFGQGTRLEIK

SEQ ID NO: 684 - protein, 107 aa, synthetic construct
DIQMTQSPSSLSASVGDRVTITCWASQGISSYLAWYQQKPGKAPKLLIYAASTLQSGVPSRFSGSGSGTEFTLTISSLQPEDFATYYCQQLNSYPLTFGGGTKVEIK

SEQ ID NO: 685 - protein, 120 aa, synthetic construct
QVQLVESGPALVKPSQTLTLTCTFSGFSLNTYGMFVSWIRQPPGKALEWLAHIHWDDDKYYSTSLKTRLTISKDTSKNQVVLTMTNMDPVDTATYYCARGHNNLNYIIHWGQGTLVTVSS

SEQ ID NO: 686 - protein, 107 aa, synthetic construct
DILMTQSPSSLSASVGDRVTITCRASQGIRNDLGWYQQKPGKAPKLLIYAASTLQSGVPSRFSGSGSGTDFTLTISSLQPEDFATYYCLQDYNYPFTFGPGTKVEIK

SEQ ID NO: 687 - protein, 116 aa, synthetic construct
QVQLVESGGGLVQPGGSLRLSCAVSGFIFSSYEMNWVRQAPGKGLEWVSYISSSGSTIFYADSVKGRFTISRDNAKNSLYLQMNSLRAEDTAVYYCVSGVVLFDVWGQGTMVTVSS

SEQ ID NO: 688 - protein, 107 aa, synthetic construct
DIVMTQSPATLSVSPGERATLSCRASQSVSSNFAWYQQKPGQAPRLLIYSASSRATGIPVRFSGSGSGTEFTLTISSLQSEDFAVYYCQQYNIWPRTFGQGTKVEIK

SEQ ID NO: 689 - protein, 125 aa, synthetic construct
QVQLVESGGGLVQPGGSLRLSCAASGFTFSNYWMTWVRQAPGKGLEWVANIKEDGSEKDYVDSVKGRFTISRDNAKNSLYLQMNSLRGEDTAVYYCARDGEQLVDYYYYYVMDVWGQGTTVTVSS

SEQ ID NO: 690 - protein, 107 aa, synthetic construct
DIQMTQSPSSVSASVGDRVTITCRASQGISSWLAWYQQKPGKAPKLLIYAASSLQSGVPSRFSGSGSGTDFTLTISSLQPEDFATYYCQKANSFPYTFGQGTKVEIK

SEQ ID NO: 691 - protein, 117 aa, synthetic construct
EVQLVESGGGVVQPGRSLRLSCAASGFTFSSYGMHWVRQAPGKGLEWVAVIWYDGSNKYYADSVKGRFTISRDISKNTLYLQMNSLRAEDTAVYYCAGQLDLFFDYWGQGTLVTVSS

SEQ ID NO: 692 - protein, 121 aa, synthetic construct
EVQLVQSGGGLVQPGGSLRLSCATSGFTFTSYDMKWVRQAPGLGLEWVSAISGSGGNTYYADSVKGRFTISRDNSRNTLYLQMNSLRAEDTAVYYCTRSHDFGAFDYFDYWGQGTMVTVSS

SEQ ID NO: 693 - protein, 107 aa, synthetic construct
DIQLTQSPSSLSASVGDRVTITCRASQGIRDHFGWYQQKPGKAPKRLIYAASSLHSGVPSRFSGSGSGTEFTLTISSLQPEDFATYYCLQYDTYPLTFGGGTKVEIK

SEQ ID NO: 694 - protein, 121 aa, synthetic construct
EVQLLESGGALVQPGGSLRLSCAASGFTFTSYAMHWVRQAPGKGLEWVSSIRGSGGGTYSADSVKGRFTISRDNSRDTLYLQMNSVRAEDTAVYYCARSHDYGAFDFFDYWGQGTTVTVSS

SEQ ID NO: 695 - protein, 107 aa, synthetic construct
DIQMTQSPSSLSASVGDRVTITCRASQGIRTDLGWYQQKPGKAPKRLIYAASSLQSGVPSRFSGSGSGTEFTLTISSLRPEDFATFYCLQYNSYPLTFGGGTKVDIK

SEQ ID NO: 696 - protein, 123 aa, synthetic construct
QVQLVESGPGLVKPSETLSLTCTVSGESISSNTYYWGWIRQPPGKGLEWIGSIDYSGTTNYNPSLKSRVTISVDTSRNHFSLRLRSVTAADTAVYYCAREWGNYGYYYGMDVWGQGTTVTVSS

SEQ ID NO: 697 - protein, 123 aa, synthetic construct
EVQLVESGGGLVKPGGSLRLSCAASGFTFSDYYMNWIRQAPGKGLEWVSYISSSGTTIYYADSVKGRFTISRDNAKKSLYLEMNSLRAEDTAVYYCAREGYGNDYYYYGIDVWGQGTTVTVSS

SEQ ID NO: 698 - protein, 112 aa, synthetic construct
DIQLTQSPLSLPVTPGEPASISCRSSQSLLHGNGYNYLTWYLQKPGQSPQLLIYLGSNRASGVPDRFSGSGSGTDFTLKISRVEAEDVGVYYCMQALQTPYTFGQGTKVEIK

SEQ ID NO: 699 - protein, 122 aa, synthetic construct
EVQLVESGGGVVQPGRSLRLSCAASGFTFSSFGMHWVRQAPGKGLEWVIFISYDGSDKYYADSVKGRFAISRDSSKNTLYLQMNSLRAEDTAVYYCAKENGILTDSYGMDVWGQGTTVTVSS

SEQ ID NO: 700 - protein, 124 aa, synthetic construct
EVQLVESGAEVKKPGASVKVSCKASGYTFTSYGISWVRQAPGQGLEWMGWISVYHGNTNYAQKFQGRVTMTTDTSTSTAYMELRSLRSDDTAVYYCAREGYYDFWSGYYPFDYWGQGTTVTVSS

SEQ ID NO: 701 - protein, 121 aa, synthetic construct
EVQLVESGGSVVRPGGSLRLSCEASGFTFDDYGMSWVRQDPGKGLEWVSGINWNGDRTNYADSVKGRFIISRDNAKNSVYLQMNSLRAEDSALYHCARDQGLGVAATLDYWGQGTMVTVSS

SEQ ID NO: 702 - protein, 123 aa, synthetic construct
EVQLVESGGGLVKPGGSLRLSCAASGFTFSVYYMNWIRQAPGKGLEWVSYISSSGSTIYYADSVKGRFTISRDNAKNSLYLQMNSLRAEDTAVYYCGREGYSGTYSYYGMDVWGQGTTVTVSS

SEQ ID NO: 703 - protein, 107 aa, synthetic construct
DIQLTQSPSSLSASVGDRVTITCRASQDISHYSAWYQQKPGKLPNLLIYAASTLQSGVPSRFSGSGSGTDFSLTTSSLQPEDVATYYCQKYNSVPLTFGGRTKVEIK

SEQ ID NO: 704 - protein, 22 aa, synthetic construct
LLNENSYVPREAGSQKDENLAL

SEQ ID NO: 705 - protein, 15 aa, synthetic construct
IYMDQTKFPIVNAEL

SEQ ID NO: 706 - protein, 5 aa, synthetic construct
TYKEL

SEQ ID NO: 707 - protein, 19 aa, synthetic construct
KRKLSEKLDSTDFTGTIKL

SEQ ID NO: 708 - protein, 20 aa, synthetic construct
YTLIEKTMQNVKHPVTGQFL

SEQ ID NO: 709 - protein, 17 aa, synthetic construct
LIERIPELNKVARAAAE

SEQ ID NO: 710 - protein, 19 aa, synthetic construct
LNENSYVPREAGSQKDENL

SEQ ID NO: 711 - protein, 9 aa, synthetic construct
GTKKDFEDL

SEQ ID NO: 712 - protein, 26 aa, synthetic construct
SVIIVDKNGRLVYLVENPGGYVAYSK

SEQ ID NO: 713 - protein, 19 aa, synthetic construct
LLNENSYVPREAGSQKDEN

SEQ ID NO: 714 - protein, 12 aa, synthetic construct
DQTKFPIVNAEL

SEQ ID NO: 715 - protein, 14 aa, synthetic construct
TYKELIERIPELNK

SEQ ID NO: 716 - protein, 24 aa, synthetic construct
SVIIVDKNGRLVYLVENPGGYVAY

SEQ ID NO: 717 - protein, 20 aa, synthetic construct
FGNMEGDCPSDWKTDSTCRM

SEQ ID NO: 718 - protein, 4 aa, synthetic construct
FEDL

SEQ ID NO: 719 - protein, 21 aa, synthetic construct
LVENPGGYVAYSKAATVTGKL

SEQ ID NO: 720 - protein, 17 aa, synthetic construct
IYMDQTKFPIVNAELSF

SEQ ID NO: 721 - protein, 9 aa, synthetic construct
ISRAAAEKL

SEQ ID NO: 722 - protein, 18 aa, synthetic construct
VTSESKNVKLTVSNVLKE

SEQ ID NO: 723 - protein, 16 aa, synthetic construct
FCEDTDYPYLGTTMDT

SEQ ID NO: 724 - DNA, 1597 bp, synthetic construct
  source 1..1597: mol_type = other DNA
gttgacattgattattgactagttattaatagtaatcaattacggggtcattagttcatagcccatatatggagttccgcgttacataacttacggtaaatggcccgcctggctgaccgcccaacgacccccgcccattgacgtcaataatgacgtatgttcccatagtaacgccaatagggactttccattgacgtcaatgggtggagtatttacggtaaactgcccacttggcagtacatcaagtgtatcatatgccaagtacgccccctattgacgtcaatgacggtaaatggcccgcctggcattatgcccagtacatgaccttatgggactttcctacttggcagtacatctacgtattagtcatcgctattaccatggtgatgcggttttggcagtacatcaatgggcgtggatagcggtttgactcacggggatttccaagtctccaccccattgacgtcaatgggagtttgttttggcaccaaaatcaacgggactttccaaaatgtcgtaacaactccgccccattgacgcaaatgggcggtaggcgtgtacggtgggaggtctatataagcagagctctccctatcagtgatagagatctccctatcagtgatagagatcgtcgacgtttagtgaaccgtcagatcgcctggagacgccatccacgctgttttgacctccatagaagacaccgggaccgatccagcctccgcggccgggaacggtgcattggaacgcggattccccgtgccaagagtgacgtaagtaccgcctatagagtctataggcccacccccttggcttcttatgcatgctatactgtttttggcttggggtctatacacccccgcttcctcatgttataggtgatggtatagcttagcctataggtgtgggttattgaccattattgaccactcccctattggtgacgatactttccattactaatccataacatggctctttgccacaactctctttattggctatatgccaatacactgtccttcagagactgacacggactctgtatttttacaggatggggtctcatttattatttacaaattcacatatacaacaccaccgtccccagtgcccgcagtttttattaaacataacgtgggatctccacgcgaatctcgggtacgtgttccggacatgggctcttctccggtagcggcggagcttctacatccgagccctgctcccatgcctccagcgactcatggtcgctcggcagctccttgctcctaacagtggaggccagacttaggcacagcacgatgcccaccaccaccagtgtgccgcacaaggccgtggcggtagggtatgtgtctgaaaatgagctcggggagcgggcttgcaccgctgacgcatttggaagacttaaggcagcggcagaagaagatgcaggcagctgagttgttgtgttctgataagagtcagaggtaactcccgttgcggtgctgttaacggtggagggcagtgtagtctgagcagtactcgttgctgccgcgcgcgccaccagacataatagctgacagactaacagactgttcctttccatgggtcttttctgcag

SEQ ID NO: 725 - DNA, 1271 bp, synthetic construct
  source 1..1271: mol_type = other DNA
aggctcagaggcacacaggagtttctgggctcaccctgcccccttccaacccctcagttcccatcctccagcagctgtttgtgtgctgcctctgaagtccacactgaacaaacttcagcctactcatgtccctaaaatgggcaaacattgcaagcagcaaacagcaaacacacagccctccctgcctgctgaccttggagctggggcagaggtcagagacctctctgggcccatgccacctccaacatccactcgaccccttggaatttcggtggagaggagcagaggttgtcctggcgtggtttaggtagtgtgagaggggtacccggggatcttgctaccagtggaacagccactaaggattctgcagtgagagcagagggccagctaagtggtactctcccagagactgtctgactcacgccaccccctccaccttggacacaggacgctgtggtttctgagccaggtacaatgactcctttcggtaagtgcagtggaagctgtacactgcccaggcaaagcgtccgggcagcgtaggcgggcgactcagatcccagccagtggacttagcccctgtttgctcctccgataactggggtgaccttggttaatattcaccagcagcctcccccgttgcccctctggatccactgcttaaatacggacgaggacagggccctgtctcctcagcttcaggcaccaccactgacctgggacagtgaatagatcctgagaacttcagggtgagtctatgggacccttgatgttttctttccccttcttttctatggttaagttcatgtcataggaaggggagaagtaacagggtacacatattgaccaaatcagggtaattttgcatttgtaattttaaaaaatgctttcttcttttaatatacttttttgtttatcttatttctaatactttccctaatctctttctttcagggcaataatgatacaatgtatcatgcctctttgcaccattctaaagaataacagtgataatttctgggttaaggcaatagcaatatttctgcatataaatatttctgcatataaattgtaactgatgtaagaggtttcatattgctaatagcagctacaatccagctaccattctgcttttattttctggttgggataaggctggattattctgagtccaagctaggcccttttgctaatcttgttcatacctcttatcttcctcccacagctcctgggcaacctgctggtctctctgctggcccatcactttggcaaag

SEQ ID NO: 726 - DNA, 308 bp, synthetic construct
  source 1..308: mol_type = other DNA
gggggaggctgctggtgaatattaaccaaggtcaccccagttatcggaggagcaaacaggggctaagtccacagccgtggtaccgtctgtctgcacatttcgtagagcgagtgttccgatactctaatctccctaggcaaggttcatatttgtgtaggttacttattctccttttgttgactaagtcaataatcagaatcagcaggtttggagtcagcttggcagggatcagcagcctgggttggaaggagggggtataaaagccccttcaccaggagaagccgtcacacagatccacaagctcctga

SEQ ID NO: 727 - DNA, 87 bp, synthetic construct
  source 1..87: mol_type = other DNA
atgcacagacctagacgtcgtggaactcgtccacctccactggcactgctcgctgctctcctcctggctgcacgtggtgctgatgca

SEQ ID NO: 728 - protein, 631 aa, Homo sapiens
MPRYGASLRQSCPRSGREQGQDGTAGAPGLLWMGLVLALALALALALALSDSRVLWAPAEAHPLSPQGHPARLHRIVPRLRDVFGWGNLTCPICKGLFTAINLGLKKEPNVARVGSVAIKLCNLLKIAPPAVCQSIVHLFEDDMVEVWRRSVLSPSEACGLLLGSTCGHWDIFSSWNISLPTVPKPPPKPPSPPAPGAPVSRILFLTDLHWDHDYLEGTDPDCADPLCCRRGSGLPPASRPGAGYWGEYSKCDLPLRTLESLLSGLGPAGPFDMVYWTGDIPAHDVWHQTRQDQLRALTTVTALVRKFLGPVPVYPAVGNHESTPVNSFPPPFIEGNHSSRWLYEAMAKAWEPWLPAEALRTLRIGGFYALSPYPGLRLISLNMNFCSRENFWLLINSTDPAGQLQWLVGELQAAEDRGDKVHIIGHIPPGHCLKSWSWNYYRIVARYENTLAAQFFGHTHVDEFEVFYDEETLSRPLAVAFLAPSATTYIGLNPGYRVYQIDGNYSGSSHVVLDHETYILNLTQANIPGAIPHWQLLYRARETYGLPNTLPTAWHNLVYRMRGDMQLFQTFWFLYHKGHPPSEPCGTPCRLATLCAQLSARADSPALCRHLMPDGSLPEAQSLWPRPLFC

SEQ ID NO: 729 - DNA, 2410 bp, Homo sapiens
  source 1..2410: mol_type = other DNA
agtcagccgactacagagaagggtaatcgggtgtccccggcgccgcccggggccctgagggctggctagggtccaggccgggggggacgggacagacgaaccagccccgtgtaggaagcgcgacaatgccccgctacggagcgtcactccgccagagctgccccaggtccggccgggagcagggacaagacgggaccgccggagcccccggactcctttggatgggcctggtgctggcgctggcgctggcgctggcgctggcgctggctctgtctgactctcgggttctctgggctccggcagaggctcaccctctttctccccaaggccatcctgccaggttacatcgcatagtgccccggctccgagatgtctttgggtgggggaacctcacctgcccaatctgcaaaggtctattcaccgccatcaacctcgggctgaagaaggaacccaatgtggctcgcgtgggctccgtggccatcaagctgtgcaatctgctgaagatagcaccacctgccgtgtgccaatccattgtccacctctttgaggatgacatggtggaggtgtggagacgctcagtgctgagcccatctgaggcctgtggcctgctcctgggctccacctgtgggcactgggacattttctcatcttggaacatctctttgcctactgtgccgaagccgccccccaaaccccctagccccccagccccaggtgcccctgtcagccgcatcctcttcctcactgacctgcactgggatcatgactacctggagggcacggaccctgactgtgcagacccactgtgctgccgccggggttctggcctgccgcccgcatcccggccaggtgccggatactggggcgaatacagcaagtgtgacctgcccctgaggaccctggagagcctgttgagtgggctgggcccagccggcccttttgatatggtgtactggacaggagacatccccgcacatgatgtctggcaccagactcgtcaggaccaactgcgggccctgaccaccgtcacagcacttgtgaggaagttcctggggccagtgccagtgtaccctgctgtgggtaaccatgaaagcacacctgtcaatagcttccctccccccttcattgagggcaaccactcctcccgctggctctatgaagcgatggccaaggcttgggagccctggctgcctgccgaagccctgcgcaccctcagaattggggggttctatgctctttccccataccccggtctccgcctcatctctctcaatatgaatttttgttcccgtgagaacttctggctcttgatcaactccacggatcccgcaggacagctccagtggctggtgggggagcttcaggctgctgaggatcgaggagacaaagtgcatataattggccacattcccccagggcactgtctgaagagctggagctggaattattaccgaattgtagccaggtatgagaacaccctggctgctcagttctttggccacactcatgtggatgaatttgaggtcttctatgatgaagagactctgagccggccgctggctgtagccttcctggcacccagtgcaactacctacatcggccttaatcctggttaccgtgtgtaccaaatagatggaaactactccgggagctctcacgtggtcctggaccatgagacctacatcctgaatctgacccaggcaaacataccgggagccataccgcactggcagcttctctacagggctcgagaaacctatgggctgcccaacacactgcctaccgcctggcacaacctggtatatcgcatgcggggcgacatgcaacttttccagaccttctggtttctctaccataagggccacccaccctcggagccctgtggcacgccctgccgtctggctactctttgtgcccagctctctgcccgtgctgacagccctgctctgtgccgccacctgatgccagatgggagcctcccagaggcccagagcctgtggccaaggccactgttttgctagggccccagggcccacatttgggaaagttcttgatgtaggaaagggtgaaaaagcccaaatgctgctgtggttcaaccaggcaagatcatccggtgaaagaaccagtccctgggccccaaggatgccggggaaacaggaccttctcctttcctggagctggtttagctggatatgggagggggtttggctgcctgtgcccaggagctagactgccttgaggctgctgtcctttcacagccatggagtagaggcctaagttgacactgccctgggcagacaagacaggagctgtcgccccaggcctgtgctgcccagccaggaaccctgtactgctgctgcgacctgatgctgccagtctgttaaaataaagataagagacttggactcca

SEQ ID NO: 730 - DNA, 1893 bp, Homo sapiens
  source 1..1893: mol_type = other DNA
atgccccgctacggagcgtcactccgccagagctgccccaggtccggccgggagcagggacaagacgggaccgccggagcccccggactcctttggatgggcctggtgctggcgctggcgctggcgctggcgctggcgctggctctgtctgactctcgggttctctgggctccggcagaggctcaccctctttctccccaaggccatcctgccaggttacatcgcatagtgccccggctccgagatgtctttgggtgggggaacctcacctgcccaatctgcaaaggtctattcaccgccatcaacctcgggctgaagaaggaacccaatgtggctcgcgtgggctccgtggccatcaagctgtgcaatctgctgaagatagcaccacctgccgtgtgccaatccattgtccacctctttgaggatgacatggtggaggtgtggagacgctcagtgctgagcccatctgaggcctgtggcctgctcctgggctccacctgtgggcactgggacattttctcatcttggaacatctctttgcctactgtgccgaagccgccccccaaaccccctagccccccagccccaggtgcccctgtcagccgcatcctcttcctcactgacctgcactgggatcatgactacctggagggcacggaccctgactgtgcagacccactgtgctgccgccggggttctggcctgccgcccgcatcccggccaggtgccggatactggggcgaatacagcaagtgtgacctgcccctgaggaccctggagagcctgttgagtgggctgggcccagccggcccttttgatatggtgtactggacaggagacatccccgcacatgatgtctggcaccagactcgtcaggaccaactgcgggccctgaccaccgtcacagcacttgtgaggaagttcctggggccagtgccagtgtaccctgctgtgggtaaccatgaaagcacacctgtcaatagcttccctccccccttcattgagggcaaccactcctcccgctggctctatgaagcgatggccaaggcttgggagccctggctgcctgccgaagccctgcgcaccctcagaattggggggttctatgctctttccccataccccggtctccgcctcatctctctcaatatgaatttttgttcccgtgagaacttctggctcttgatcaactccacggatcccgcaggacagctccagtggctggtgggggagcttcaggctgctgaggatcgaggagacaaagtgcatataattggccacattcccccagggcactgtctgaagagctggagctggaattattaccgaattgtagccaggtatgagaacaccctggctgctcagttctttggccacactcatgtggatgaatttgaggtcttctatgatgaagagactctgagccggccgctggctgtagccttcctggcacccagtgcaactacctacatcggccttaatcctggttaccgtgtgtaccaaatagatggaaactactccgggagctctcacgtggtcctggaccatgagacctacatcctgaatctgacccaggcaaacataccgggagccataccgcactggcagcttctctacagggctcgagaaacctatgggctgcccaacacactgcctaccgcctggcacaacctggtatatcgcatgcggggcgacatgcaacttttccagaccttctggtttctctaccataagggccacccaccctcggagccctgtggcacgccctgccgtctggctactctttgtgcccagctctctgcccgtgctgacagccctgctctgtgccgccacctgatgccagatgggagcctcccagaggcccagagcctgtggccaaggccactgttttgc

SEQ ID NO: 731 - protein, 585 aa, synthetic construct
LALSDSRVLWAPAEAHPLSPQGHPARLHRIVPRLRDVFGWGNLTCPICKGLFTAINLGLKKEPNVARVGSVAIKLCNLLKIAPPAVCQSIVHLFEDDMVEVWRRSVLSPSEACGLLLGSTCGHWDIFSSWNISLPTVPKPPPKPPSPPAPGAPVSRILFLTDLHWDHDYLEGTDPDCADPLCCRRGSGLPPASRPGAGYWGEYSKCDLPLRTLESLLSGLGPAGPFDMVYWTGDIPAHDVWHQTRQDQLRALTTVTALVRKFLGPVPVYPAVGNHESTPVNSFPPPFIEGNHSSRWLYEAMAKAWEPWLPAEALRTLRIGGFYALSPYPGLRLISLNMNFCSRENFWLLINSTDPAGQLQWLVGELQAAEDRGDKVHIIGHIPPGHCLKSWSWNYYRIVARYENTLAAQFFGHTHVDEFEVFYDEETLSRPLAVAFLAPSATTYIGLNPGYRVYQIDGNYSGSSHVVLDHETYILNLTQANIPGAIPHWQLLYRARETYGLPNTLPTAWHNLVYRMRGDMQLFQTFWFLYHKGHPPSEPCGTPCRLATLCAQLSARADSPALCRHLMPDGSLPEAQSLWPRPLFC

SEQ ID NO: 732 - DNA, 1710 bp, synthetic construct
  source 1..1710: mol_type = other DNA
caccctctttctccccaaggccatcctgccaggttacatcgcatagtgccccggctccgagatgtctttgggtgggggaacctcacctgcccaatctgcaaaggtctattcaccgccatcaacctcgggctgaagaaggaacccaatgtggctcgcgtgggctccgtggccatcaagctgtgcaatctgctgaagatagcaccacctgccgtgtgccaatccattgtccacctctttgaggatgacatggtggaggtgtggagacgctcagtgctgagcccatctgaggcctgtggcctgctcctgggctccacctgtgggcactgggacattttctcatcttggaacatctctttgcctactgtgccgaagccgccccccaaaccccctagccccccagccccaggtgcccctgtcagccgcatcctcttcctcactgacctgcactgggatcatgactacctggagggcacggaccctgactgtgcagacccactgtgctgccgccggggttctggcctgccgcccgcatcccggccaggtgccggatactggggcgaatacagcaagtgtgacctgcccctgaggaccctggagagcctgttgagtgggctgggcccagccggcccttttgatatggtgtactggacaggagacatccccgcacatgatgtctggcaccagactcgtcaggaccaactgcgggccctgaccaccgtcacagcacttgtgaggaagttcctggggccagtgccagtgtaccctgctgtgggtaaccatgaaagcacacctgtcaatagcttccctccccccttcattgagggcaaccactcctcccgctggctctatgaagcgatggccaaggcttgggagccctggctgcctgccgaagccctgcgcaccctcagaattggggggttctatgctctttccccataccccggtctccgcctcatctctctcaatatgaatttttgttcccgtgagaacttctggctcttgatcaactccacggatcccgcaggacagctccagtggctggtgggggagcttcaggctgctgaggatcgaggagacaaagtgcatataattggccacattcccccagggcactgtctgaagagctggagctggaattattaccgaattgtagccaggtatgagaacaccctggctgctcagttctttggccacactcatgtggatgaatttgaggtcttctatgatgaagagactctgagccggccgctggctgtagccttcctggcacccagtgcaactacctacatcggccttaatcctggttaccgtgtgtaccaaatagatggaaactactccgggagctctcacgtggtcctggaccatgagacctacatcctgaatctgacccaggcaaacataccgggagccataccgcactggcagcttctctacagggctcgagaaacctatgggctgcccaacacactgcctaccgcctggcacaacctggtatatcgcatgcggggcgacatgcaacttttccagaccttctggtttctctaccataagggccacccaccctcggagccctgtggcacgccctgccgtctggctactctttgtgcccagctctctgcccgtgctgacagccctgctctgtgccgccacctgatgccagatgggagcctcccagaggcccagagcctgtggccaaggccactgttttgc

SEQ ID NO: 733 - protein, 570 aa, synthetic construct
HPLSPQGHPARLHRIVPRLRDVFGWGNLTCPICKGLFTAINLGLKKEPNVARVGSVAIKLCNLLKIAPPAVCQSIVHLFEDDMVEVWRRSVLSPSEACGLLLGSTCGHWDIFSSWNISLPTVPKPPPKPPSPPAPGAPVSRILFLTDLHWDHDYLEGTDPDCADPLCCRRGSGLPPASRPGAGYWGEYSKCDLPLRTLESLLSGLGPAGPFDMVYWTGDIPAHDVWHQTRQDQLRALTTVTALVRKFLGPVPVYPAVGNHESTPVNSFPPPFIEGNHSSRWLYEAMAKAWEPWLPAEALRTLRIGGFYALSPYPGLRLISLNMNFCSRENFWLLINSTDPAGQLQWLVGELQAAEDRGDKVHIIGHIPPGHCLKSWSWNYYRIVARYENTLAAQFFGHTHVDEFEVFYDEETLSRPLAVAFLAPSATTYIGLNPGYRVYQIDGNYSGSSHVVLDHETYILNLTQANIPGAIPHWQLLYRARETYGLPNTLPTAWHNLVYRMRGDMQLFQTFWFLYHKGHPPSEPCGTPCRLATLCAQLSARADSPALCRHLMPDGSLPEAQSLWPRPLFC

SEQ ID NO: 734 - DNA, 1755 bp, synthetic construct
  source 1..1755: mol_type = other DNA
ctggctctgtctgactctcgggttctctgggctccggcagaggctcaccctctttctccccaaggccatcctgccaggttacatcgcatagtgccccggctccgagatgtctttgggtgggggaacctcacctgcccaatctgcaaaggtctattcaccgccatcaacctcgggctgaagaaggaacccaatgtggctcgcgtgggctccgtggccatcaagctgtgcaatctgctgaagatagcaccacctgccgtgtgccaatccattgtccacctctttgaggatgacatggtggaggtgtggagacgctcagtgctgagcccatctgaggcctgtggcctgctcctgggctccacctgtgggcactgggacattttctcatcttggaacatctctttgcctactgtgccgaagccgccccccaaaccccctagccccccagccccaggtgcccctgtcagccgcatcctcttcctcactgacctgcactgggatcatgactacctggagggcacggaccctgactgtgcagacccactgtgctgccgccggggttctggcctgccgcccgcatcccggccaggtgccggatactggggcgaatacagcaagtgtgacctgcccctgaggaccctggagagcctgttgagtgggctgggcccagccggcccttttgatatggtgtactggacaggagacatccccgcacatgatgtctggcaccagactcgtcaggaccaactgcgggccctgaccaccgtcacagcacttgtgaggaagttcctggggccagtgccagtgtaccctgctgtgggtaaccatgaaagcacacctgtcaatagcttccctccccccttcattgagggcaaccactcctcccgctggctctatgaagcgatggccaaggcttgggagccctggctgcctgccgaagccctgcgcaccctcagaattggggggttctatgctctttccccataccccggtctccgcctcatctctctcaatatgaatttttgttcccgtgagaacttctggctcttgatcaactccacggatcccgcaggacagctccagtggctggtgggggagcttcaggctgctgaggatcgaggagacaaagtgcatataattggccacattcccccagggcactgtctgaagagctggagctggaattattaccgaattgtagccaggtatgagaacaccctggctgctcagttctttggccacactcatgtggatgaatttgaggtcttctatgatgaagagactctgagccggccgctggctgtagccttcctggcacccagtgcaactacctacatcggccttaatcctggttaccgtgtgtaccaaatagatggaaactactccgggagctctcacgtggtcctggaccatgagacctacatcctgaatctgacccaggcaaacataccgggagccataccgcactggcagcttctctacagggctcgagaaacctatgggctgcccaacacactgcctaccgcctggcacaacctggtatatcgcatgcggggcgacatgcaacttttccagaccttctggtttctctaccataagggccacccaccctcggagccctgtggcacgccctgccgtctggctactctttgtgcccagctctctgcccgtgctgacagccctgctctgtgccgccacctgatgccagatgggagcctcccagaggcccagagcctgtggccaaggccactgttttgc

SEQ ID NO: 735 - DNA, 1755 bp, synthetic construct
  source 1..1755: mol_type = other DNA
ctggctctgtctgactctcgggttctctgggctccggcagaggctcaccctctttctccccaaggccatcctgccaggttacatcgcatagtgccccggctccgagatgtctttgggtgggggaacctcacctgcccaatctgcaaaggtctattcaccgccatcaacctcgggctgaagaaggaacccaatgtggctcgcgtgggctccgtggccatcaagctgtgcaatctgctgaagatagcaccacctgccgtgtgccaatccattgtccacctctttgaggatgacatggtggaggtgtggagacgctcagtgctgagcccatctgaggcctgtggcctgctcctgggctccacctgtgggcactgggacattttctcatcttggaacatctctttgcctactgtgccgaagccgccccccaaaccccctagccccccagccccaggtgctcctgtcagccgcatcctcttcctcactgacctgcactgggatcatgactacctggagggcacggaccctgactgtgcagacccactgtgctgccgccggggttctggcctgccgcccgcatccaggccaggtgccggatactggggcgaatacagcaagtgtgacctgcccctgaggaccctggagagcctgttgagtgggctgggcccagccggcccttttgatatggtgtactggacaggagacatccccgcacatgatgtctggcaccagactcgtcaggaccaactgcgggccctgaccaccgtcacagcacttgtgaggaagttcctggggccagtgccagtgtaccctgctgtgggtaaccatgaaagcacacctgtcaatagcttccctccccccttcattgagggcaaccactcctcccgctggctctatgaagcgatggccaaggcttgggagccctggctgcctgccgaagccctgcgcaccctcagaattggggggttctatgctctttccccataccccggtctccgcctcatctctctcaatatgaatttttgttcccgtgagaacttctggctcttgatcaactccacggatcccgcaggacagctccagtggctggtgggggagcttcaggctgctgaggatcgaggagacaaagtgcatataattggccacattcccccagggcactgtctgaagagctggagctggaattattaccgaattgtagccaggtatgagaacaccctggctgctcagttctttggccacactcatgtggatgaatttgaggtcttctatgatgaagagactctgagccggccgctggctgtagccttcctggcacccagtgcaactacctacatcggccttaatcctggttaccgtgtgtaccaaatagatggaaactactccgggagctctcacgtggtcctggaccatgagacctacatcctgaatctgacccaggcaaacataccgggagccataccgcactggcagcttctctacagggctcgagaaacctatgggctgcccaacacactgcctaccgcctggcacaacctggtatatcgcatgcggggcgacatgcaacttttccagaccttctggtttctctaccataagggccacccaccctcggagccctgtggcacgccctgccgtctggctactctttgtgcccagctctctgcccgtgctgacagccctgctctgtgccgccacctgatgccagatgggagcctcccagaggcccagagcctgtggccaaggccactgttttgc

SEQ ID NO: 736 - DNA, 2457 bp, synthetic construct
  source 1..2457: mol_type = other DNA
gacatccagatgacccagtctccatcctccctgtctgcatctgtaggagacagagtcaccatcacttgccgggcaagtcagagcattagcagctatttaaattggtatcagcagaaaccagggaaagcccctaagctcctgatctatgctgcatccagtttgcaaagtggggtcccgtcaaggttcagtggcagtggatctgggacagatttcactctcaccatcagcagtctgcaacctgaagattttgcaacttactactgtcaacagagttacagtacccctccgatcaccttcggccaagggacacgactggagattaaaggcggcggcggaagcggagggggaggatcaggaggaggcggatccgaagtgcagctggtggagtctgggggaggcttggttcagcctggcaggtccctgagactctcctgtgcagcctctggattcacctttgatgattatgccatgaactgggtccggcaagctccagggaagggcctggagtgggtctcaggtattagttggagtagtggtagcatggactatgcggactctgtgaagggccgattcaccatctccagagacaacgccaaaaactccctgtatctgcaaatgaacagtctgagaactgaggacacggccttatattactgtgcaaaagctagggaagttggagactactacggtatggacgtctggggccaagggaccacggtcaccgtctcctcaggaggtggtggaagtcaccctctttctccccaaggccatcctgccaggttacatcgcatagtgccccggctccgagatgtctttgggtgggggaacctcacctgcccaatctgcaaaggtctattcaccgccatcaacctcgggctgaagaaggaacccaatgtggctcgcgtgggctccgtggccatcaagctgtgcaatctgctgaagatagcaccacctgccgtgtgccaatccattgtccacctctttgaggatgacatggtggaggtgtggagacgctcagtgctgagcccatctgaggcctgtggcctgctcctgggctccacctgtgggcactgggacattttctcatcttggaacatctctttgcctactgtgccgaagccgccccccaaaccccctagccccccagccccaggtgcccctgtcagccgcatcctcttcctcactgacctgcactgggatcatgactacctggagggcacggaccctgactgtgcagacccactgtgctgccgccggggttctggcctgccgcccgcatcccggccaggtgccggatactggggcgaatacagcaagtgtgacctgcccctgaggaccctggagagcctgttgagtgggctgggcccagccggcccttttgatatggtgtactggacaggagacatccccgcacatgatgtctggcaccagactcgtcaggaccaactgcgggccctgaccaccgtcacagcacttgtgaggaagttcctggggccagtgccagtgtaccctgctgtgggtaaccatgaaagcacacctgtcaatagcttccctccccccttcattgagggcaaccactcctcccgctggctctatgaagcgatggccaaggcttgggagccctggctgcctgccgaagccctgcgcaccctcagaattggggggttctatgctctttccccataccccggtctccgcctcatctctctcaatatgaatttttgttcccgtgagaacttctggctcttgatcaactccacggatcccgcaggacagctccagtggctggtgggggagcttcaggctgctgaggatcgaggagacaaagtgcatataattggccacattcccccagggcactgtctgaagagctggagctggaattattaccgaattgtagccaggtatgagaacaccctggctgctcagttctttggccacactcatgtggatgaatttgaggtcttctatgatgaagagactctgagccggccgctggctgtagccttcctggcacccagtgcaactacctacatcggccttaatcctggttaccgtgtgtaccaaatagatggaaactactccgggagctctcacgtggtcctggaccatgagacctacatcctgaatctgacccaggcaaacataccgggagccataccgcactggcagcttctctacagggctcgagaaacctatgggctgcccaacacactgcctaccgcctggcacaacctggtatatcgcatgcggggcgacatgcaacttttccagaccttctggtttctctaccataagggccacccaccctcggagccctgtggcacgccctgccgtctggctactctttgtgcccagctctctgcccgtgctgacagccctgctctgtgccgccacctgatgccagatgggagcctcccagaggcccagagcctgtggccaaggccactgttttgc

SEQ ID NO: 737 - protein, 819 aa, synthetic construct
DIQMTQSPSSLSASVGDRVTITCRASQSISSYLNWYQQKPGKAPKLLIYAASSLQSGVPSRFSGSGSGTDFTLTISSLQPEDFATYYCQQSYSTPPITFGQGTRLEIKGGGGSGGGGSGGGGSEVQLVESGGGLVQPGRSLRLSCAASGFTFDDYAMNWVRQAPGKGLEWVSGISWSSGSMDYADSVKGRFTISRDNAKNSLYLQMNSLRTEDTALYYCAKAREVGDYYGMDVWGQGTTVTVSSGGGGSHPLSPQGHPARLHRIVPRLRDVFGWGNLTCPICKGLFTAINLGLKKEPNVARVGSVAIKLCNLLKIAPPAVCQSIVHLFEDDMVEVWRRSVLSPSEACGLLLGSTCGHWDIFSSWNISLPTVPKPPPKPPSPPAPGAPVSRILFLTDLHWDHDYLEGTDPDCADPLCCRRGSGLPPASRPGAGYWGEYSKCDLPLRTLESLLSGLGPAGPFDMVYWTGDIPAHDVWHQTRQDQLRALTTVTALVRKFLGPVPVYPAVGNHESTPVNSFPPPFIEGNHSSRWLYEAMAKAWEPWLPAEALRTLRIGGFYALSPYPGLRLISLNMNFCSRENFWLLINSTDPAGQLQWLVGELQAAEDRGDKVHIIGHIPPGHCLKSWSWNYYRIVARYENTLAAQFFGHTHVDEFEVFYDEETLSRPLAVAFLAPSATTYIGLNPGYRVYQIDGNYSGSSHVVLDHETYILNLTQANIPGAIPHWQLLYRARETYGLPNTLPTAWHNLVYRMRGDMQLFQTFWFLYHKGHPPSEPCGTPCRLATLCAQLSARADSPALCRHLMPDGSLPEAQSLWPRPLFC

SEQ ID NO: 738 - DNA, 2457 bp, synthetic construct
  source 1..2457: mol_type = other DNA
caccctctttctccccaaggccatcctgccaggttacatcgcatagtgccccggctccgagatgtctttgggtgggggaacctcacctgcccaatctgcaaaggtctattcaccgccatcaacctcgggctgaagaaggaacccaatgtggctcgcgtgggctccgtggccatcaagctgtgcaatctgctgaagatagcaccacctgccgtgtgccaatccattgtccacctctttgaggatgacatggtggaggtgtggagacgctcagtgctgagcccatctgaggcctgtggcctgctcctgggctccacctgtgggcactgggacattttctcatcttggaacatctctttgcctactgtgccgaagccgccccccaaaccccctagccccccagccccaggtgcccctgtcagccgcatcctcttcctcactgacctgcactgggatcatgactacctggagggcacggaccctgactgtgcagacccactgtgctgccgccggggttctggcctgccgcccgcatcccggccaggtgccggatactggggcgaatacagcaagtgtgacctgcccctgaggaccctggagagcctgttgagtgggctgggcccagccggcccttttgatatggtgtactggacaggagacatccccgcacatgatgtctggcaccagactcgtcaggaccaactgcgggccctgaccaccgtcacagcacttgtgaggaagttcctggggccagtgccagtgtaccctgctgtgggtaaccatgaaagcacacctgtcaatagcttccctccccccttcattgagggcaaccactcctcccgctggctctatgaagcgatggccaaggcttgggagccctggctgcctgccgaagccctgcgcaccctcagaattggggggttctatgctctttccccataccccggtctccgcctcatctctctcaatatgaatttttgttcccgtgagaacttctggctcttgatcaactccacggatcccgcaggacagctccagtggctggtgggggagcttcaggctgctgaggatcgaggagacaaagtgcatataattggccacattcccccagggcactgtctgaagagctggagctggaattattaccgaattgtagccaggtatgagaacaccctggctgctcagttctttggccacactcatgtggatgaatttgaggtcttctatgatgaagagactctgagccggccgctggctgtagccttcctggcacccagtgcaactacctacatcggccttaatcctggttaccgtgtgtaccaaatagatggaaactactccgggagctctcacgtggtcctggaccatgagacctacatcctgaatctgacccaggcaaacataccgggagccataccgcactggcagcttctctacagggctcgagaaacctatgggctgcccaacacactgcctaccgcctggcacaacctggtatatcgcatgcggggcgacatgcaacttttccagaccttctggtttctctaccataagggccacccaccctcggagccctgtggcacgccctgccgtctggctactctttgtgcccagctctctgcccgtgctgacagccctgctctgtgccgccacctgatgccagatgggagcctcccagaggcccagagcctgtggccaaggccactgttttgcggaggtggtggaagtgacatccagatgacccagtctccatcctccctgtctgcatctgtaggagacagagtcaccatcacttgccgggcaagtcagagcattagcagctatttaaattggtatcagcagaaaccagggaaagcccctaagctcctgatctatgctgcatccagtttgcaaagtggggtcccgtcaaggttcagtggcagtggatctgggacagatttcactctcaccatcagcagtctgcaacctgaagattttgcaacttactactgtcaacagagttacagtacccctccgatcaccttcggccaagggacacgactggagattaaaggcggcggcggaagcggagggggaggatcaggaggaggcggatccgaagtgcagctggtggagtctgggggaggcttggttcagcctggcaggtccctgagactctcctgtgcagcctctggattcacctttgatgattatgccatgaactgggtccggcaagctccagggaagggcctggagtgggtctcaggtattagttggagtagtggtagcatggactatgcggactctgtgaagggccgattcaccatctccagagacaacgccaaaaactccctgtatctgcaaatgaacagtctgagaactgaggacacggccttatattactgtgcaaaagctagggaagttggagactactacggtatggacgtctggggccaagggaccacggtcaccgtctcctca

SEQ ID NO: 739 - protein, 819 aa, synthetic construct
HPLSPQGHPARLHRIVPRLRDVFGWGNLTCPICKGLFTAINLGLKKEPNVARVGSVAIKLCNLLKIAPPAVCQSIVHLFEDDMVEVWRRSVLSPSEACGLLLGSTCGHWDIFSSWNISLPTVPKPPPKPPSPPAPGAPVSRILFLTDLHWDHDYLEGTDPDCADPLCCRRGSGLPPASRPGAGYWGEYSKCDLPLRTLESLLSGLGPAGPFDMVYWTGDIPAHDVWHQTRQDQLRALTTVTALVRKFLGPVPVYPAVGNHESTPVNSFPPPFIEGNHSSRWLYEAMAKAWEPWLPAEALRTLRIGGFYALSPYPGLRLISLNMNFCSRENFWLLINSTDPAGQLQWLVGELQAAEDRGDKVHIIGHIPPGHCLKSWSWNYYRIVARYENTLAAQFFGHTHVDEFEVFYDEETLSRPLAVAFLAPSATTYIGLNPGYRVYQIDGNYSGSSHVVLDHETYILNLTQANIPGAIPHWQLLYRARETYGLPNTLPTAWHNLVYRMRGDMQLFQTFWFLYHKGHPPSEPCGTPCRLATLCAQLSARADSPALCRHLMPDGSLPEAQSLWPRPLFCGGGGSDIQMTQSPSSLSASVGDRVTITCRASQSISSYLNWYQQKPGKAPKLLIYAASSLQSGVPSRFSGSGSGTDFTLTISSLQPEDFATYYCQQSYSTPPITFGQGTRLEIKGGGGSGGGGSGGGGSEVQLVESGGGLVQPGRSLRLSCAASGFTFDDYAMNWVRQAPGKGLEWVSGISWSSGSMDYADSVKGRFTISRDNAKNSLYLQMNSLRTEDTALYYCAKAREVGDYYGMDVWGQGTTVTVSS

SEQ ID NO: 740 - DNA, 3788 bp, synthetic construct
  source 1..3788: mol_type = other DNA
  misc_feature 1..141: note = ITR
  misc_feature 162..1432: note = ApoE enhancer + human AAT Promoter + HBB2 intron
  misc_feature 1492..3384: note = Human ASM
  misc_feature 3396..3625: note = SV40 poly-A
  misc_feature 3648..3788: note = ITR
cctgcaggcagctgcgcgctcgctcgctcactgaggccgcccgggcaaagcccgggcgtcgggcgacctttggtcgcccggcctcagtgagcgagcgagcgcgcagagagggagtggccaactccatcactaggggttcctgcggccgcacgcgtggtaccaggctcagaggcacacaggagtttctgggctcaccctgcccccttccaacccctcagttcccatcctccagcagctgtttgtgtgctgcctctgaagtccacactgaacaaacttcagcctactcatgtccctaaaatgggcaaacattgcaagcagcaaacagcaaacacacagccctccctgcctgctgaccttggagctggggcagaggtcagagacctctctgggcccatgccacctccaacatccactcgaccccttggaatttcggtggagaggagcagaggttgtcctggcgtggtttaggtagtgtgagaggggtacccggggatcttgctaccagtggaacagccactaaggattctgcagtgagagcagagggccagctaagtggtactctcccagagactgtctgactcacgccaccccctccaccttggacacaggacgctgtggtttctgagccaggtacaatgactcctttcggtaagtgcagtggaagctgtacactgcccaggcaaagcgtccgggcagcgtaggcgggcgactcagatcccagccagtggacttagcccctgtttgctcctccgataactggggtgaccttggttaatattcaccagcagcctcccccgttgcccctctggatccactgcttaaatacggacgaggacagggccctgtctcctcagcttcaggcaccaccactgacctgggacagtgaatagatcctgagaacttcagggtgagtctatgggacccttgatgttttctttccccttcttttctatggttaagttcatgtcataggaaggggagaagtaacagggtacacatattgaccaaatcagggtaattttgcatttgtaattttaaaaaatgctttcttcttttaatatacttttttgtttatcttatttctaatactttccctaatctctttctttcagggcaataatgatacaatgtatcatgcctctttgcaccattctaaagaataacagtgataatttctgggttaaggcaatagcaatatttctgcatataaatatttctgcatataaattgtaactgatgtaagaggtttcatattgctaatagcagctacaatccagctaccattctgcttttattttctggttgggataaggctggattattctgagtccaagctaggcccttttgctaatcttgttcatacctcttatcttcctcccacagctcctgggcaacctgctggtctctctgctggcccatcactttggcaaagaagcttatactcgagctctagattgggaacccgggtctctcgaattcgagatctccaccatgccccgctacggagcgtcactccgccagagctgccccaggtccggccgggagcagggacaagacgggaccgccggagcccccggactcctttggatgggcctggtgctggcgctggcgctggcgctggcgctggcgctggctctgtctgactctcgggttctctgggctccggcagaggctcaccctctttctccccaaggccatcctgccaggttacatcgcatagtgccccggctccgagatgtctttgggtgggggaacctcacctgcccaatctgcaaaggtctattcaccgccatcaacctcgggctgaagaaggaacccaatgtggctcgcgtgggctccgtggccatcaagctgtgcaatctgctgaagatagcaccacctgccgtgtgccaatccattgtccacctctttgaggatgacatggtggaggtgtggagacgctcagtgctgagcccatctgaggcctgtggcctgctcctgggctccacctgtgggcactgggacattttctcatcttggaacatctctttgcctactgtgccgaagccgccccccaaaccccctagccccccagccccaggtgcccctgtcagccgcatcctcttcctcactgacctgcactgggatcatgactacctggagggcacggaccctgactgtgcagacccactgtgctgccgccggggttctggcctgccgcccgcatcccggccaggtgccggatactggggcgaatacagcaagtgtgacctgcccctgaggaccctggagagcctgttgagtgggctgggcccagccggcccttttgatatggtgtactggacaggagacatccccgcacatgatgtctggcaccagactcgtcaggaccaactgcgggccctgaccaccgtcacagcacttgtgaggaagttcctggggccagtgccagtgtaccctgctgtgggtaaccatgaaagcacacctgtcaatagcttccctccccccttcattgagggcaaccactcctcccgctggctctatgaagcgatggccaaggcttgggagccctggctgcctgccgaagccctgcgcaccctcagaattggggggttctatgctctttccccataccccggtctccgcctcatctctctcaatatgaatttttgttcccgtgagaacttctggctcttgatcaactccacggatcccgcaggacagctccagtggctggtgggggagcttcaggctgctgaggatcgaggagacaaagtgcatataattggccacattcccccagggcactgtctgaagagctggagctggaattattaccgaattgtagccaggtatgagaacaccctggctgctcagttctttggccacactcatgtggatgaatttgaggtcttctatgatgaagagactctgagccggccgctggctgtagccttcctggcacccagtgcaactacctacatcggccttaatcctggttaccgtgtgtaccaaatagatggaaactactccgggagctctcacgtggtcctggaccatgagacctacatcctgaatctgacccaggcaaacataccgggagccataccgcactggcagcttctctacagggctcgagaaacctatgggctgcccaacacactgcctaccgcctggcacaacctggtatatcgcatgcggggcgacatgcaacttttccagaccttctggtttctctaccataagggccacccaccctcggagccctgtggcacgccctgccgtctggctactctttgtgcccagctctctgcccgtgctgacagccctgctctgtgccgccacctgatgccagatgggagcctcccagaggcccagagcctgtggccaaggccactgttttgctaggcggccgctaatcagccataccacatttgtagaggttttacttgctttaaaaaacctcccacacctccccctgaacctgaaacataaaatgaatgcaattgttgttgttaacttgtttattgcagcttataatggttacaaataaagcaatagcatcacaaatttcacaaataaagcatttttttcactgcattctagttgtggtttgtccaaactcatcaatgtatcttatcatgtcgatgtgcggaccgagcggccgcaggaacccctagtgatggagttggccactccctctctgcgcgctcgctcgctcactgaggccgggcgaccaaaggtcgcccgacgcccgggctttgcccgggcggcctcagtgagcgagcgagcgcgcagctgcctgcagg

SEQ ID NO: 741 - DNA, 3692 bp, synthetic construct
  source 1..3692: mol_type = other DNA
  misc_feature 1..141: note = ITR
  misc_feature 162..1432: note = ApoE enhancer + human AAT Promoter + HBB2 intron
  misc_feature 1492..1578: note = mROR signal peptide
  misc_feature 1579..3288: note = Human ASM
  misc_feature 3300..3529: note = SV40 poly-A
  misc_feature 3552..3692: note = ITR
cctgcaggcagctgcgcgctcgctcgctcactgaggccgcccgggcaaagcccgggcgtcgggcgacctttggtcgcccggcctcagtgagcgagcgagcgcgcagagagggagtggccaactccatcactaggggttcctgcggccgcacgcgtggtaccaggctcagaggcacacaggagtttctgggctcaccctgcccccttccaacccctcagttcccatcctccagcagctgtttgtgtgctgcctctgaagtccacactgaacaaacttcagcctactcatgtccctaaaatgggcaaacattgcaagcagcaaacagcaaacacacagccctccctgcctgctgaccttggagctggggcagaggtcagagacctctctgggcccatgccacctccaacatccactcgaccccttggaatttcggtggagaggagcagaggttgtcctggcgtggtttaggtagtgtgagaggggtacccggggatcttgctaccagtggaacagccactaaggattctgcagtgagagcagagggccagctaagtggtactctcccagagactgtctgactcacgccaccccctccaccttggacacaggacgctgtggtttctgagccaggtacaatgactcctttcggtaagtgcagtggaagctgtacactgcccaggcaaagcgtccgggcagcgtaggcgggcgactcagatcccagccagtggacttagcccctgtttgctcctccgataactggggtgaccttggttaatattcaccagcagcctcccccgttgcccctctggatccactgcttaaatacggacgaggacagggccctgtctcctcagcttcaggcaccaccactgacctgggacagtgaatagatcctgagaacttcagggtgagtctatgggacccttgatgttttctttccccttcttttctatggttaagttcatgtcataggaaggggagaagtaacagggtacacatattgaccaaatcagggtaattttgcatttgtaattttaaaaaatgctttcttcttttaatatacttttttgtttatcttatttctaatactttccctaatctctttctttcagggcaataatgatacaatgtatcatgcctctttgcaccattctaaagaataacagtgataatttctgggttaaggcaatagcaatatttctgcatataaatatttctgcatataaattgtaactgatgtaagaggtttcatattgctaatagcagctacaatccagctaccattctgcttttattttctggttgggataaggctggattattctgagtccaagctaggcccttttgctaatcttgttcatacctcttatcttcctcccacagctcctgggcaacctgctggtctctctgctggcccatcactttggcaaagaagcttatactcgagctctagattgggaacccgggtctctcgaattcgagatctccaccatgcacagacctagacgtcgtggaactcgtccacctccactggcactgctcgctgctctcctcctggctgcacgtggtgctgatgcacaccctctttctccccaaggccatcctgccaggttacatcgcatagtgccccggctccgagatgtctttgggtgggggaacctcacctgcccaatctgcaaaggtctattcaccgccatcaacctcgggctgaagaaggaacccaatgtggctcgcgtgggctccgtggccatcaagctgtgcaatctgctgaagatagcaccacctgccgtgtgccaatccattgtccacctctttgaggatgacatggtggaggtgtggagacgctcagtgctgagcccatctgaggcctgtggcctgctcctgggctccacctgtgggcactgggacattttctcatcttggaacatctctttgcctactgtgccgaagccgccccccaaaccccctagccccccagccccaggtgcccctgtcagccgcatcctcttcctcactgacctgcactgggatcatgactacctggagggcacggaccctgactgtgcagacccactgtgctgccgccggggttctggcctgccgcccgcatcccggccaggtgccggatactggggcgaatacagcaagtgtgacctgcccctgaggaccctggagagcctgttgagtgggctgggcccagccggcccttttgatatggtgtactggacaggagacatccccgcacatgatgtctggcaccagactcgtcaggaccaactgcgggccctgaccaccgtcacagcacttgtgaggaagttcctggggccagtgccagtgtaccctgctgtgggtaaccatgaaagcacacctgtcaatagcttccctccccccttcattgagggcaaccactcctcccgctggctctatgaagcgatggccaaggcttgggagccctggctgcctgccgaagccctgcgcaccctcagaattggggggttctatgctctttccccataccccggtctccgcctcatctctctcaatatgaatttttgttcccgtgagaacttctggctcttgatcaactccacggatcccgcaggacagctccagtggctggtgggggagcttcaggctgctgaggatcgaggagacaaagtgcatataattggccacattcccccagggcactgtctgaagagctggagctggaattattaccgaattgtagccaggtatgagaacaccctggctgctcagttctttggccacactcatgtggatgaatttgaggtcttctatgatgaagagactctgagccggccgctggctgtagccttcctggcacccagtgcaactacctacatcggccttaatcctggttaccgtgtgtaccaaatagatggaaactactccgggagctctcacgtggtcctggaccatgagacctacatcctgaatctgacccaggcaaacataccgggagccataccgcactggcagcttctctacagggctcgagaaacctatgggctgcccaacacactgcctaccgcctggcacaacctggtatatcgcatgcggggcgacatgcaacttttccagaccttctggtttctctaccataagggccacccaccctcggagccctgtggcacgccctgccgtctggctactctttgtgcccagctctctgcccgtgctgacagccctgctctgtgccgccacctgatgccagatgggagcctcccagaggcccagagcctgtggccaaggccactgttttgctaggcggccgctaatcagccataccacatttgtagaggttttacttgctttaaaaaacctcccacacctccccctgaacctgaaacataaaatgaatgcaattgttgttgttaacttgtttattgcagcttataatggttacaaataaagcaatagcatcacaaatttcacaaataaagcatttttttcactgcattctagttgtggtttgtccaaactcatcaatgtatcttatcatgtcgatgtgcggaccgagcggccgcaggaacccctagtgatggagttggccactccctctctgcgcgctcgctcgctcactgaggccgggcgaccaaaggtcgcccgacgcccgggctttgcccgggcggcctcagtgagcgagcgagcgcgcagctgcctgcagg

SEQ ID NO: 742 - DNA, 4439 bp, synthetic construct
  source 1..4439: mol_type = other DNA
  misc_feature 1..141: note = ITR
  misc_feature 162..1432: note = ApoE enhancer + human AAT Promoter + HBB2 intron
  misc_feature 1492..1578: note = mROR signal peptide
  misc_feature 1579..3288: note = Human ASM
  misc_feature 3289..3303: note = G4S linker
  misc_feature 3304..4035: note = 12847scfv
  misc_feature 4047..4276: note = SV40 poly-A
  misc_feature 4299..4439: note = ITR
cctgcaggcagctgcgcgctcgctcgctcactgaggccgcccgggcaaagcccgggcgtcgggcgacctttggtcgcccggcctcagtgagcgagcgagcgcgcagagagggagtggccaactccatcactaggggttcctgcggccgcacgcgtggtaccaggctcagaggcacacaggagtttctgggctcaccctgcccccttccaacccctcagttcccatcctccagcagctgtttgtgtgctgcctctgaagtccacactgaacaaacttcagcctactcatgtccctaaaatgggcaaacattgcaagcagcaaacagcaaacacacagccctccctgcctgctgaccttggagctggggcagaggtcagagacctctctgggcccatgccacctccaacatccactcgaccccttggaatttcggtggagaggagcagaggttgtcctggcgtggtttaggtagtgtgagaggggtacccggggatcttgctaccagtggaacagccactaaggattctgcagtgagagcagagggccagctaagtggtactctcccagagactgtctgactcacgccaccccctccaccttggacacaggacgctgtggtttctgagccaggtacaatgactcctttcggtaagtgcagtggaagctgtacactgcccaggcaaagcgtccgggcagcgtaggcgggcgactcagatcccagccagtggacttagcccctgtttgctcctccgataactggggtgaccttggttaatattcaccagcagcctcccccgttgcccctctggatccactgcttaaatacggacgaggacagggccctgtctcctcagcttcaggcaccaccactgacctgggacagtgaatagatcctgagaacttcagggtgagtctatgggacccttgatgttttctttccccttcttttctatggttaagttcatgtcataggaaggggagaagtaacagggtacacatattgaccaaatcagggtaattttgcatttgtaattttaaaaaatgctttcttcttttaatatacttttttgtttatcttatttctaatactttccctaatctctttctttcagggcaataatgatacaatgtatcatgcctctttgcaccattctaaagaataacagtgataatttctgggttaaggcaatagcaatatttctgcatataaatatttctgcatataaattgtaactgatgtaagaggtttcatattgctaatagcagctacaatccagctaccattctgcttttattttctggttgggataaggctggattattctgagtccaagctaggcccttttgctaatcttgttcatacctcttatcttcctcccacagctcctgggcaacctgctggtctctctgctggcccatcactttggcaaagaagcttatactcgagctctagattgggaacccgggtctctcgaattcgagatctccaccatgcacagacctagacgtcgtggaactcgtccacctccactggcactgctcgctgctctcctcctggctgcacgtggtgctgatgcacaccctctttctccccaaggccatcctgccaggttacatcgcatagtgccccggctccgagatgtctttgggtgggggaacctcacctgcccaatctgcaaaggtctattcaccgccatcaacctcgggctgaagaaggaacccaatgtggctcgcgtgggctccgtggccatcaagctgtgcaatctgctgaagatagcaccacctgccgtgtgccaatccattgtccacctctttgaggatgacatggtggaggtgtggagacgctcagtgctgagcccatctgaggcctgtggcctgctcctgggctccacctgtgggcactgggacattttctcatcttggaacatctctttgcctactgtgccgaagccgccccccaaaccccctagccccccagccccaggtgcccctgtcagccgcatcctcttcctcactgacctgcactgggatcatgactacctggagggcacggaccctgactgtgcagacccactgtgctgccgccggggttctggcctgccgcccgcatcccggccaggtgccggatactggggcgaatacagcaagtgtgacctgcccctgaggaccctggagagcctgttgagtgggctgggcccagccggcccttttgatatggtgtactggacaggagacatccccgcacatgatgtctggcaccagactcgtcaggaccaactgcgggccctgaccaccgtcacagcacttgtgaggaagttcctggggccagtgccagtgtaccctgctgtgggtaaccatgaaagcacacctgtcaatagcttccctccccccttcattgagggcaaccactcctcccgctggctctatgaagcgatggccaaggcttgggagccctggctgcctgccgaagccctgcgcaccctcagaattggggggttctatgctctttccccataccccggtctccgcctcatctctctcaatatgaatttttgttcccgtgagaacttctggctcttgatcaactccacggatcccgcaggacagctccagtggctggtgggggagcttcaggctgctgaggatcgaggagacaaagtgcatataattggccacattcccccagggcactgtctgaagagctggagctggaattattaccgaattgtagccaggtatgagaacaccctggctgctcagttctttggccacactcatgtggatgaatttgaggtcttctatgatgaagagactctgagccggccgctggctgtagccttcctggcacccagtgcaactacctacatcggccttaatcctggttaccgtgtgtaccaaatagatggaaactactccgggagctctcacgtggtcctggaccatgagacctacatcctgaatctgacccaggcaaacataccgggagccataccgcactggcagcttctctacagggctcgagaaacctatgggctgcccaacacactgcctaccgcctggcacaacctggtatatcgcatgcggggcgacatgcaacttttccagaccttctggtttctctaccataagggccacccaccctcggagccctgtggcacgccctgccgtctggctactctttgtgcccagctctctgcccgtgctgacagccctgctctgtgccgccacctgatgccagatgggagcctcccagaggcccagagcctgtggccaaggccactgttttgcggaggtggtggaagtgacatccagatgacccagtctccatcctccctgtctgcatctgtaggagacagagtcaccatcacttgccgggcaagtcagagcattagcagctatttaaattggtatcagcagaaaccagggaaagcccctaagctcctgatctatgctgcatccagtttgcaaagtggggtcccgtcaaggttcagtggcagtggatctgggacagatttcactctcaccatcagcagtctgcaacctgaagattttgcaacttactactgtcaacagagttacagtacccctccgatcaccttcggccaagggacacgactggagattaaaggcggcggcggaagcggagggggaggatcaggaggaggcggatccgaagtgcagctggtggagtctgggggaggcttggttcagcctggcaggtccctgagactctcctgtgcagcctctggattcacctttgatgattatgccatgaactgggtccggcaagctccagggaagggcctggagtgggtctcaggtattagttggagtagtggtagcatggactatgcggactctgtgaagggccgattcaccatctccagagacaacgccaaaaactccctgtatctgcaaatgaacagtctgagaactgaggacacggccttatattactgtgcaaaagctagggaagttggagactactacggtatggacgtctggggccaagggaccacggtcaccgtctcctcataggcggccgctaatcagccataccacatttgtagaggttttacttgctttaaaaaacctcccacacctccccctgaacctgaaacataaaatgaatgcaattgttgttgttaacttgtttattgcagcttataatggttacaaataaagcaatagcatcacaaatttcacaaataaagcatttttttcactgcattctagttgtggtttgtccaaactcatcaatgtatcttatcatgtcgatgtgcggaccgagcggccgcaggaacccctagtgatggagttggccactccctctctgcgcgctcgctcgctcactgaggccgggcgaccaaaggtcgcccgacgcccgggctttgcccgggcggcctcagtgagcgagcgagcgcgcagctgcctgcagg

SEQ ID NO: 743 - DNA, 4439 bp, synthetic construct
  source 1..4439: mol_type = other DNA
  misc_feature 1..141: note = ITR
  misc_feature 162..1432: note = ApoE enhancer + human AAT Promoter + HBB2 intron
  misc_feature 1492..1578: note = mROR signal peptide
  misc_feature 1579..2310: note = 12847scfv
  misc_feature 2311..2325: note = G4S linker
  misc_feature 2326..4035: note = Human ASM
  misc_feature 4047..4276: note = SV40 poly-A
  misc_feature 4299..4439: note = ITR
cctgcaggcagctgcgcgctcgctcgctcactgaggccgcccgggcaaagcccgggcgtcgggcgacctttggtcgcccggcctcagtgagcgagcgagcgcgcagagagggagtggccaactccatcactaggggttcctgcggccgcacgcgtggtaccaggctcagaggcacacaggagtttctgggctcaccctgcccccttccaacccctcagttcccatcctccagcagctgtttgtgtgctgcctctgaagtccacactgaacaaacttcagcctactcatgtccctaaaatgggcaaacattgcaagcagcaaacagcaaacacacagccctccctgcctgctgaccttggagctggggcagaggtcagagacctctctgggcccatgccacctccaacatccactcgaccccttggaatttcggtggagaggagcagaggttgtcctggcgtggtttaggtagtgtgagaggggtacccggggatcttgctaccagtggaacagccactaaggattctgcagtgagagcagagggccagctaagtggtactctcccagagactgtctgactcacgccaccccctccaccttggacacaggacgctgtggtttctgagccaggtacaatgactcctttcggtaagtgcagtggaagctgtacactgcccaggcaaagcgtccgggcagcgtaggcgggcgactcagatcccagccagtggacttagcccctgtttgctcctccgataactggggtgaccttggttaatattcaccagcagcctcccccgttgcccctctggatccactgcttaaatacggacgaggacagggccctgtctcctcagcttcaggcaccaccactgacctgggacagtgaatagatcctgagaacttcagggtgagtctatgggacccttgatgttttctttccccttcttttctatggttaagttcatgtcataggaaggggagaagtaacagggtacacatattgaccaaatcagggtaattttgcatttgtaattttaaaaaatgctttcttcttttaatatacttttttgtttatcttatttctaatactttccctaatctctttctttcagggcaataatgatacaatgtatcatgcctctttgcaccattctaaagaataacagtgataatttctgggttaaggcaatagcaatatttctgcatataaatatttctgcatataaattgtaactgatgtaagaggtttcatattgctaatagcagctacaatccagctaccattctgcttttattttctggttgggataaggctggattattctgagtccaagctaggcccttttgctaatcttgttcatacctcttatcttcctcccacagctcctgggcaacctgctggtctctctgctggcccatcactttggcaaagaagcttatactcgagctctagattgggaacccgggtctctcgaattcgagatctccaccatgcacagacctagacgtcgtggaactcgtccacctccactggcactgctcgctgctctcctcctggctgcacgtggtgctgatgcagacatccagatgacccagtctccatcctccctgtctgcatctgtaggagacagagtcaccatcacttgccgggcaagtcagagcattagcagctatttaaattggtatcagcagaaaccagggaaagcccctaagctcctgatctatgctgcatccagtttgcaaagtggggtcccgtcaaggttcagtggcagtggatctgggacagatttcactctcaccatcagcagtctgcaacctgaagattttgcaacttactactgtcaacagagttacagtacccctccgatcaccttcggccaagggacacgactggagattaaaggcggcggcggaagcggagggggaggatcaggaggaggcggatccgaagtgcagctggtggagtctgggggaggcttggttcagcctggcaggtccctgagactctcctgtgcagcctctggattcacctttgatgattatgccatgaactgggtccggcaagctccagggaagggcctggagtgggtctcaggtattagttggagtagtggtagcatggactatgcggactctgtgaagggccgattcaccatctccagagacaacgccaaaaactccctgtatctgcaaatgaacagtctgagaactgaggacacggccttatattactgtgcaaaagctagggaagttggagactactacggtatggacgtctggggccaagggaccacggtcaccgtctcctcaggaggtggtggaagtcaccctctttctccccaaggccatcctgccaggttacatcgcatagtgccccggctccgagatgtctttgggtgggggaacctcacctgcccaatctgcaaaggtctattcaccgccatcaacctcgggctgaagaaggaacccaatgtggctcgcgtgggctccgtggccatcaagctgtgcaatctgctgaagatagcaccacctgccgtgtgccaatccattgtccacctctttgaggatgacatggtggaggtgtggagacgctcagtgctgagcccatctgaggcctgtggcctgctcctgggctccacctgtgggcactgggacattttctcatcttggaacatctctttgcctactgtgccgaagccgccccccaaaccccctagccccccagccccaggtgcccctgtcagccgcatcctcttcctcactgacctgcactgggatcatgactacctggagggcacggaccctgactgtgcagacccactgtgctgccgccggggttctggcctgccgcccgcatcccggccaggtgccggatactggggcgaatacagcaagtgtgacctgcccctgaggaccctggagagcctgttgagtgggctgggcccagccggcccttttgatatggtgtactggacaggagacatccccgcacatgatgtctggcaccagactcgtcaggaccaactgcgggccctgaccaccgtcacagcacttgtgaggaagttcctggggccagtgccagtgtaccctgctgtgggtaaccatgaaagcacacctgtcaatagcttccctccccccttcattgagggcaaccactcctcccgctggctctatgaagcgatggccaaggcttgggagccctggctgcctgccgaagccctgcgcaccctcagaattggggggttctatgctctttccccataccccggtctccgcctcatctctctcaatatgaatttttgttcccgtgagaacttctggctcttgatcaactccacggatcccgcaggacagctccagtggctggtgggggagcttcaggctgctgaggatcgaggagacaaagtgcatataattggccacattcccccagggcactgtctgaagagctggagctggaattattaccgaattgtagccaggtatgagaacaccctggctgctcagttctttggccacactcatgtggatgaatttgaggtcttctatgatgaagagactctgagccggccgctggctgtagccttcctggcacccagtgcaactacctacatcggccttaatcctggttaccgtgtgtaccaaatagatggaaactactccgggagctctcacgtggtcctggaccatgagacctacatcctgaatctgacccaggcaaacataccgggagccataccgcactggcagcttctctacagggctcgagaaacctatgggctgcccaacacactgcctaccgcctggcacaacctggtatatcgcatgcggggcgacatgcaacttttccagaccttctggtttctctaccataagggccacccaccctcggagccctgtggcacgccctgccgtctggctactctttgtgcccagctctctgcccgtgctgacagccctgctctgtgccgccacctgatgccagatgggagcctcccagaggcccagagcctgtggccaaggccactgttttgctaggcggccgctaatcagccataccacatttgtagaggttttacttgctttaaaaaacctcccacacctccccctgaacctgaaacataaaatgaatgcaattgttgttgttaacttgtttattgcagcttataatggttacaaataaagcaatagcatcacaaatttcacaaataaagcatttttttcactgcattctagttgtggtttgtccaaactcatcaatgtatcttatcatgtcgatgtgcggaccgagcggccgcaggaacccctagtgatggagttggccactccctctctgcgcgctcgctcgctcactgaggccgggcgaccaaaggtcgcccgacgcccgggctttgcccgggcggcctcagtgagcgagcgagcgcgcagctgcctgcagg

SEQ ID NO: 744 - DNA, 2825 bp, synthetic construct
  source 1..2825: mol_type = other DNA
  misc_feature 1..141: note = ITR
  misc_feature 162..469: note = Mouse SerpinA1 enhancer +mouse TTR Promoter
  misc_feature 529..2421: note = Human ASM
  misc_feature 2433..2662: note = SV40 poly-A
  misc_feature 2685..2825: note = ITR
cctgcaggcagctgcgcgctcgctcgctcactgaggccgcccgggcaaagcccgggcgtcgggcgacctttggtcgcccggcctcagtgagcgagcgagcgcgcagagagggagtggccaactccatcactaggggttcctgcggccgcacgcgtggtaccgggggaggctgctggtgaatattaaccaaggtcaccccagttatcggaggagcaaacaggggctaagtccacagccgtggtaccgtctgtctgcacatttcgtagagcgagtgttccgatactctaatctccctaggcaaggttcatatttgtgtaggttacttattctccttttgttgactaagtcaataatcagaatcagcaggtttggagtcagcttggcagggatcagcagcctgggttggaaggagggggtataaaagccccttcaccaggagaagccgtcacacagatccacaagctcctgaaagcttatactcgagctctagattgggaacccgggtctctcgaattcgagatctccaccatgccccgctacggagcgtcactccgccagagctgccccaggtccggccgggagcagggacaagacgggaccgccggagcccccggactcctttggatgggcctggtgctggcgctggcgctggcgctggcgctggcgctggctctgtctgactctcgggttctctgggctccggcagaggctcaccctctttctccccaaggccatcctgccaggttacatcgcatagtgccccggctccgagatgtctttgggtgggggaacctcacctgcccaatctgcaaaggtctattcaccgccatcaacctcgggctgaagaaggaacccaatgtggctcgcgtgggctccgtggccatcaagctgtgcaatctgctgaagatagcaccacctgccgtgtgccaatccattgtccacctctttgaggatgacatggtggaggtgtggagacgctcagtgctgagcccatctgaggcctgtggcctgctcctgggctccacctgtgggcactgggacattttctcatcttggaacatctctttgcctactgtgccgaagccgccccccaaaccccctagccccccagccccaggtgcccctgtcagccgcatcctcttcctcactgacctgcactgggatcatgactacctggagggcacggaccctgactgtgcagacccactgtgctgccgccggggttctggcctgccgcccgcatcccggccaggtgccggatactggggcgaatacagcaagtgtgacctgcccctgaggaccctggagagcctgttgagtgggctgggcccagccggcccttttgatatggtgtactggacaggagacatccccgcacatgatgtctggcaccagactcgtcaggaccaactgcgggccctgaccaccgtcacagcacttgtgaggaagttcctggggccagtgccagtgtaccctgctgtgggtaaccatgaaagcacacctgtcaatagcttccctccccccttcattgagggcaaccactcctcccgctggctctatgaagcgatggccaaggcttgggagccctggctgcctgccgaagccctgcgcaccctcagaattggggggttctatgctctttccccataccccggtctccgcctcatctctctcaatatgaatttttgttcccgtgagaacttctggctcttgatcaactccacggatcccgcaggacagctccagtggctggtgggggagcttcaggctgctgaggatcgaggagacaaagtgcatataattggccacattcccccagggcactgtctgaagagctggagctggaattattaccgaattgtagccaggtatgagaacaccctggctgctcagttctttggccacactcatgtggatgaatttgaggtcttctatgatgaagagactctgagccggccgctggctgtagccttcctggcacccagtgcaactacctacatcggccttaatcctggttaccgtgtgtaccaaatagatggaaactactccgggagctctcacgtggtcctggaccatgagacctacatcctgaatctgacccaggcaaacataccgggagccataccgcactggcagcttctctacagggctcgagaaacctatgggctgcccaacacactgcctaccgcctggcacaacctggtatatcgcatgcggggcgacatgcaacttttccagaccttctggtttctctaccataagggccacccaccctcggagccctgtggcacgccctgccgtctggctactctttgtgcccagctctctgcccgtgctgacagccctgctctgtgccgccacctgatgccagatgggagcctcccagaggcccagagcctgtggccaaggccactgttttgctaggcggccgctaatcagccataccacatttgtagaggttttacttgctttaaaaaacctcccacacctccccctgaacctgaaacataaaatgaatgcaattgttgttgttaacttgtttattgcagcttataatggttacaaataaagcaatagcatcacaaatttcacaaataaagcatttttttcactgcattctagttgtggtttgtccaaactcatcaatgtatcttatcatgtcgatgtgcggaccgagcggccgcaggaacccctagtgatggagttggccactccctctctgcgcgctcgctcgctcactgaggccgggcgaccaaaggtcgcccgacgcccgggctttgcccgggcggcctcagtgagcgagcgagcgcgcagctgcctgcagg

SEQ ID NO: 745 - DNA, 2774 bp, synthetic construct
  source 1..2774: mol_type = other DNA
  misc_feature 1..141: note = ITR
  misc_feature 162..469: note = Mouse SerpinA1 enhancer +mouse TTR Promoter
  misc_feature 529..615: note = mROR signal peptide
  misc_feature 616..2370: note = Human ASM
  misc_feature 2382..2611: note = SV40 poly-A
  misc_feature 2634..2774: note = ITR
cctgcaggcagctgcgcgctcgctcgctcactgaggccgcccgggcaaagcccgggcgtcgggcgacctttggtcgcccggcctcagtgagcgagcgagcgcgcagagagggagtggccaactccatcactaggggttcctgcggccgcacgcgtggtaccgggggaggctgctggtgaatattaaccaaggtcaccccagttatcggaggagcaaacaggggctaagtccacagccgtggtaccgtctgtctgcacatttcgtagagcgagtgttccgatactctaatctccctaggcaaggttcatatttgtgtaggttacttattctccttttgttgactaagtcaataatcagaatcagcaggtttggagtcagcttggcagggatcagcagcctgggttggaaggagggggtataaaagccccttcaccaggagaagccgtcacacagatccacaagctcctgaaagcttatactcgagctctagattgggaacccgggtctctcgaattcgagatctccaccatgcacagacctagacgtcgtggaactcgtccacctccactggcactgctcgctgctctcctcctggctgcacgtggtgctgatgcactggctctgtctgactctcgggttctctgggctccggcagaggctcaccctctttctccccaaggccatcctgccaggttacatcgcatagtgccccggctccgagatgtctttgggtgggggaacctcacctgcccaatctgcaaaggtctattcaccgccatcaacctcgggctgaagaaggaacccaatgtggctcgcgtgggctccgtggccatcaagctgtgcaatctgctgaagatagcaccacctgccgtgtgccaatccattgtccacctctttgaggatgacatggtggaggtgtggagacgctcagtgctgagcccatctgaggcctgtggcctgctcctgggctccacctgtgggcactgggacattttctcatcttggaacatctctttgcctactgtgccgaagccgccccccaaaccccctagccccccagccccaggtgcccctgtcagccgcatcctcttcctcactgacctgcactgggatcatgactacctggagggcacggaccctgactgtgcagacccactgtgctgccgccggggttctggcctgccgcccgcatcccggccaggtgccggatactggggcgaatacagcaagtgtgacctgcccctgaggaccctggagagcctgttgagtgggctgggcccagccggcccttttgatatggtgtactggacaggagacatccccgcacatgatgtctggcaccagactcgtcaggaccaactgcgggccctgaccaccgtcacagcacttgtgaggaagttcctggggccagtgccagtgtaccctgctgtgggtaaccatgaaagcacacctgtcaatagcttccctccccccttcattgagggcaaccactcctcccgctggctctatgaagcgatggccaaggcttgggagccctggctgcctgccgaagccctgcgcaccctcagaattggggggttctatgctctttccccataccccggtctccgcctcatctctctcaatatgaatttttgttcccgtgagaacttctggctcttgatcaactccacggatcccgcaggacagctccagtggctggtgggggagcttcaggctgctgaggatcgaggagacaaagtgcatataattggccacattcccccagggcactgtctgaagagctggagctggaattattaccgaattgtagccaggtatgagaacaccctggctgctcagttctttggccacactcatgtggatgaatttgaggtcttctatgatgaagagactctgagccggccgctggctgtagccttcctggcacccagtgcaactacctacatcggccttaatcctggttaccgtgtgtaccaaatagatggaaactactccgggagctctcacgtggtcctggaccatgagacctacatcctgaatctgacccaggcaaacataccgggagccataccgcactggcagcttctctacagggctcgagaaacctatgggctgcccaacacactgcctaccgcctggcacaacctggtatatcgcatgcggggcgacatgcaacttttccagaccttctggtttctctaccataagggccacccaccctcggagccctgtggcacgccctgccgtctggctactctttgtgcccagctctctgcccgtgctgacagccctgctctgtgccgccacctgatgccagatgggagcctcccagaggcccagagcctgtggccaaggccactgttttgctaggcggccgctaatcagccataccacatttgtagaggttttacttgctttaaaaaacctcccacacctccccctgaacctgaaacataaaatgaatgcaattgttgttgttaacttgtttattgcagcttataatggttacaaataaagcaatagcatcacaaatttcacaaataaagcatttttttcactgcattctagttgtggtttgtccaaactcatcaatgtatcttatcatgtcgatgtgcggaccgagcggccgcaggaacccctagtgatggagttggccactccctctctgcgcgctcgctcgctcactgaggccgggcgaccaaaggtcgcccgacgcccgggctttgcccgggcggcctcagtgagcgagcgagcgcgcagctgcctgcagg

SEQ ID NO: 746 - DNA, 3476 bp, synthetic construct
  source 1..3476: mol_type = other DNA
  misc_feature 1..141: note = ITR
  misc_feature 162..469: note = Mouse SerpinA1 enhancer +mouse TTR Promoter
  misc_feature 529..615: note = mROR signal peptide
  misc_feature 616..2325: note = Human ASM
  misc_feature 2326..2340: note = G4S linker
  misc_feature 2341..3072: note = 12847scfv
  misc_feature 3084..3313: note = SV40 poly-A
  misc_feature 3336..3476: note = ITR
cctgcaggcagctgcgcgctcgctcgctcactgaggccgcccgggcaaagcccgggcgtcgggcgacctttggtcgcccggcctcagtgagcgagcgagcgcgcagagagggagtggccaactccatcactaggggttcctgcggccgcacgcgtggtaccgggggaggctgctggtgaatattaaccaaggtcaccccagttatcggaggagcaaacaggggctaagtccacagccgtggtaccgtctgtctgcacatttcgtagagcgagtgttccgatactctaatctccctaggcaaggttcatatttgtgtaggttacttattctccttttgttgactaagtcaataatcagaatcagcaggtttggagtcagcttggcagggatcagcagcctgggttggaaggagggggtataaaagccccttcaccaggagaagccgtcacacagatccacaagctcctgaaagcttatactcgagctctagattgggaacccgggtctctcgaattcgagatctccaccatgcacagacctagacgtcgtggaactcgtccacctccactggcactgctcgctgctctcctcctggctgcacgtggtgctgatgcacaccctctttctccccaaggccatcctgccaggttacatcgcatagtgccccggctccgagatgtctttgggtgggggaacctcacctgcccaatctgcaaaggtctattcaccgccatcaacctcgggctgaagaaggaacccaatgtggctcgcgtgggctccgtggccatcaagctgtgcaatctgctgaagatagcaccacctgccgtgtgccaatccattgtccacctctttgaggatgacatggtggaggtgtggagacgctcagtgctgagcccatctgaggcctgtggcctgctcctgggctccacctgtgggcactgggacattttctcatcttggaacatctctttgcctactgtgccgaagccgccccccaaaccccctagccccccagccccaggtgcccctgtcagccgcatcctcttcctcactgacctgcactgggatcatgactacctggagggcacggaccctgactgtgcagacccactgtgctgccgccggggttctggcctgccgcccgcatcccggccaggtgccggatactggggcgaatacagcaagtgtgacctgcccctgaggaccctggagagcctgttgagtgggctgggcccagccggcccttttgatatggtgtactggacaggagacatccccgcacatgatgtctggcaccagactcgtcaggaccaactgcgggccctgaccaccgtcacagcacttgtgaggaagttcctggggccagtgccagtgtaccctgctgtgggtaaccatgaaagcacacctgtcaatagcttccctccccccttcattgagggcaaccactcctcccgctggctctatgaagcgatggccaaggcttgggagccctggctgcctgccgaagccctgcgcaccctcagaattggggggttctatgctctttccccataccccggtctccgcctcatctctctcaatatgaatttttgttcccgtgagaacttctggctcttgatcaactccacggatcccgcaggacagctccagtggctggtgggggagcttcaggctgctgaggatcgaggagacaaagtgcatataattggccacattcccccagggcactgtctgaagagctggagctggaattattaccgaattgtagccaggtatgagaacaccctggctgctcagttctttggccacactcatgtggatgaatttgaggtcttctatgatgaagagactctgagccggccgctggctgtagccttcctggcacccagtgcaactacctacatcggccttaatcctggttaccgtgtgtaccaaatagatggaaactactccgggagctctcacgtggtcctggaccatgagacctacatcctgaatctgacccaggcaaacataccgggagccataccgcactggcagcttctctacagggctcgagaaacctatgggctgcccaacacactgcctaccgcctggcacaacctggtatatcgcatgcggggcgacatgcaacttttccagaccttctggtttctctaccataagggccacccaccctcggagccctgtggcacgccctgccgtctggctactctttgtgcccagctctctgcccgtgctgacagccctgctctgtgccgccacctgatgccagatgggagcctcccagaggcccagagcctgtggccaaggccactgttttgcggaggtggtggaagtgacatccagatgacccagtctccatcctccctgtctgcatctgtaggagacagagtcaccatcacttgccgggcaagtcagagcattagcagctatttaaattggtatcagcagaaaccagggaaagcccctaagctcctgatctatgctgcatccagtttgcaaagtggggtcccgtcaaggttcagtggcagtggatctgggacagatttcactctcaccatcagcagtctgcaacctgaagattttgcaacttactactgtcaacagagttacagtacccctccgatcaccttcggccaagggacacgactggagattaaaggcggcggcggaagcggagggggaggatcaggaggaggcggatccgaagtgcagctggtggagtctgggggaggcttggttcagcctggcaggtccctgagactctcctgtgcagcctctggattcacctttgatgattatgccatgaactgggtccggcaagctccagggaagggcctggagtgggtctcaggtattagttggagtagtggtagcatggactatgcggactctgtgaagggccgattcaccatctccagagacaacgccaaaaactccctgtatctgcaaatgaacagtctgagaactgaggacacggccttatattactgtgcaaaagctagggaagttggagactactacggtatggacgtctggggccaagggaccacggtcaccgtctcctcataggcggccgctaatcagccataccacatttgtagaggttttacttgctttaaaaaacctcccacacctccccctgaacctgaaacataaaatgaatgcaattgttgttgttaacttgtttattgcagcttataatggttacaaataaagcaatagcatcacaaatttcacaaataaagcatttttttcactgcattctagttgtggtttgtccaaactcatcaatgtatcttatcatgtcgatgtgcggaccgagcggccgcaggaacccctagtgatggagttggccactccctctctgcgcgctcgctcgctcactgaggccgggcgaccaaaggtcgcccgacgcccgggctttgcccgggcggcctcagtgagcgagcgagcgcgcagctgcctgcagg

SEQ ID NO: 747 - DNA, 3476 bp, synthetic construct
  source 1..3476: mol_type = other DNA
  misc_feature 1..141: note = ITR
  misc_feature 162..469: note = Mouse SerpinA1 enhancer +mouse TTR Promoter
  misc_feature 529..615: note = mROR signal peptide
  misc_feature 616..1347: note = 12847scfv
  misc_feature 1348..1362: note = G4S linker
  misc_feature 1363..3072: note = Human ASM
  misc_feature 3084..3313: note = SV40 poly-A
  misc_feature 3336..3476: note = ITR
cctgcaggcagctgcgcgctcgctcgctcactgaggccgcccgggcaaagcccgggcgtcgggcgacctttggtcgcccggcctcagtgagcgagcgagcgcgcagagagggagtggccaactccatcactaggggttcctgcggccgcacgcgtggtaccgggggaggctgctggtgaatattaaccaaggtcaccccagttatcggaggagcaaacaggggctaagtccacagccgtggtaccgtctgtctgcacatttcgtagagcgagtgttccgatactctaatctccctaggcaaggttcatatttgtgtaggttacttattctccttttgttgactaagtcaataatcagaatcagcaggtttggagtcagcttggcagggatcagcagcctgggttggaaggagggggtataaaagccccttcaccaggagaagccgtcacacagatccacaagctcctgaaagcttatactcgagctctagattgggaacccgggtctctcgaattcgagatctccaccatgcacagacctagacgtcgtggaactcgtccacctccactggcactgctcgctgctctcctcctggctgcacgtggtgctgatgcagacatccagatgacccagtctccatcctccctgtctgcatctgtaggagacagagtcaccatcacttgccgggcaagtcagagcattagcagctatttaaattggtatcagcagaaaccagggaaagcccctaagctcctgatctatgctgcatccagtttgcaaagtggggtcccgtcaaggttcagtggcagtggatctgggacagatttcactctcaccatcagcagtctgcaacctgaagattttgcaacttactactgtcaacagagttacagtacccctccgatcaccttcggccaagggacacgactggagattaaaggcggcggcggaagcggagggggaggatcaggaggaggcggatccgaagtgcagctggtggagtctgggggaggcttggttcagcctggcaggtccctgagactctcctgtgcagcctctggattcacctttgatgattatgccatgaactgggtccggcaagctccagggaagggcctggagtgggtctcaggtattagttggagtagtggtagcatggactatgcggactctgtgaagggccgattcaccatctccagagacaacgccaaaaactccctgtatctgcaaatgaacagtctgagaactgaggacacggccttatattactgtgcaaaagctagggaagttggagactactacggtatggacgtctggggccaagggaccacggtcaccgtctcctcaggaggtggtggaagtcaccctctttctccccaaggccatcctgccaggttacatcgcatagtgccccggctccgagatgtctttgggtgggggaacctcacctgcccaatctgcaaaggtctattcaccgccatcaacctcgggctgaagaaggaacccaatgtggctcgcgtgggctccgtggccatcaagctgtgcaatctgctgaagatagcaccacctgccgtgtgccaatccattgtccacctctttgaggatgacatggtggaggtgtggagacgctcagtgctgagcccatctgaggcctgtggcctgctcctgggctccacctgtgggcactgggacattttctcatcttggaacatctctttgcctactgtgccgaagccgccccccaaaccccctagccccccagccccaggtgcccctgtcagccgcatcctcttcctcactgacctgcactgggatcatgactacctggagggcacggaccctgactgtgcagacccactgtgctgccgccggggttctggcctgccgcccgcatcccggccaggtgccggatactggggcgaatacagcaagtgtgacctgcccctgaggaccctggagagcctgttgagtgggctgggcccagccggcccttttgatatggtgtactggacaggagacatccccgcacatgatgtctggcaccagactcgtcaggaccaactgcgggccctgaccaccgtcacagcacttgtgaggaagttcctggggccagtgccagtgtaccctgctgtgggtaaccatgaaagcacacctgtcaatagcttccctccccccttcattgagggcaaccactcctcccgctggctctatgaagcgatggccaaggcttgggagccctggctgcctgccgaagccctgcgcaccctcagaattggggggttctatgctctttccccataccccggtctccgcctcatctctctcaatatgaatttttgttcccgtgagaacttctggctcttgatcaactccacggatcccgcaggacagctccagtggctggtgggggagcttcaggctgctgaggatcgaggagacaaagtgcatataattggccacattcccccagggcactgtctgaagagctggagctggaattattaccgaattgtagccaggtatgagaacaccctggctgctcagttctttggccacactcatgtggatgaatttgaggtcttctatgatgaagagactctgagccggccgctggctgtagccttcctggcacccagtgcaactacctacatcggccttaatcctggttaccgtgtgtaccaaatagatggaaactactccgggagctctcacgtggtcctggaccatgagacctacatcctgaatctgacccaggcaaacataccgggagccataccgcactggcagcttctctacagggctcgagaaacctatgggctgcccaacacactgcctaccgcctggcacaacctggtatatcgcatgcggggcgacatgcaacttttccagaccttctggtttctctaccataagggccacccaccctcggagccctgtggcacgccctgccgtctggctactctttgtgcccagctctctgcccgtgctgacagccctgctctgtgccgccacctgatgccagatgggagcctcccagaggcccagagcctgtggccaaggccactgttttgctaggcggccgctaatcagccataccacatttgtagaggttttacttgctttaaaaaacctcccacacctccccctgaacctgaaacataaaatgaatgcaattgttgttgttaacttgtttattgcagcttataatggttacaaataaagcaatagcatcacaaatttcacaaataaagcatttttttcactgcattctagttgtggtttgtccaaactcatcaatgtatcttatcatgtcgatgtgcggaccgagcggccgcaggaacccctagtgatggagttggccactccctctctgcgcgctcgctcgctcactgaggccgggcgaccaaaggtcgcccgacgcccgggctttgcccgggcggcctcagtgagcgagcgagcgcgcagctgcctgcagg

SEQ ID NO: 748 - DNA, 2134 bp, synthetic construct
  source 1..2134: mol_type = other DNA
  misc_feature 1..1893: note = Human ASM
  misc_feature 1905..2134: note = SV40 poly-A
atgccccgctacggagcgtcactccgccagagctgccccaggtccggccgggagcagggacaagacgggaccgccggagcccccggactcctttggatgggcctggtgctggcgctggcgctggcgctggcgctggcgctggctctgtctgactctcgggttctctgggctccggcagaggctcaccctctttctccccaaggccatcctgccaggttacatcgcatagtgccccggctccgagatgtctttgggtgggggaacctcacctgcccaatctgcaaaggtctattcaccgccatcaacctcgggctgaagaaggaacccaatgtggctcgcgtgggctccgtggccatcaagctgtgcaatctgctgaagatagcaccacctgccgtgtgccaatccattgtccacctctttgaggatgacatggtggaggtgtggagacgctcagtgctgagcccatctgaggcctgtggcctgctcctgggctccacctgtgggcactgggacattttctcatcttggaacatctctttgcctactgtgccgaagccgccccccaaaccccctagccccccagccccaggtgcccctgtcagccgcatcctcttcctcactgacctgcactgggatcatgactacctggagggcacggaccctgactgtgcagacccactgtgctgccgccggggttctggcctgccgcccgcatcccggccaggtgccggatactggggcgaatacagcaagtgtgacctgcccctgaggaccctggagagcctgttgagtgggctgggcccagccggcccttttgatatggtgtactggacaggagacatccccgcacatgatgtctggcaccagactcgtcaggaccaactgcgggccctgaccaccgtcacagcacttgtgaggaagttcctggggccagtgccagtgtaccctgctgtgggtaaccatgaaagcacacctgtcaatagcttccctccccccttcattgagggcaaccactcctcccgctggctctatgaagcgatggccaaggcttgggagccctggctgcctgccgaagccctgcgcaccctcagaattggggggttctatgctctttccccataccccggtctccgcctcatctctctcaatatgaatttttgttcccgtgagaacttctggctcttgatcaactccacggatcccgcaggacagctccagtggctggtgggggagcttcaggctgctgaggatcgaggagacaaagtgcatataattggccacattcccccagggcactgtctgaagagctggagctggaattattaccgaattgtagccaggtatgagaacaccctggctgctcagttctttggccacactcatgtggatgaatttgaggtcttctatgatgaagagactctgagccggccgctggctgtagccttcctggcacccagtgcaactacctacatcggccttaatcctggttaccgtgtgtaccaaatagatggaaactactccgggagctctcacgtggtcctggaccatgagacctacatcctgaatctgacccaggcaaacataccgggagccataccgcactggcagcttctctacagggctcgagaaacctatgggctgcccaacacactgcctaccgcctggcacaacctggtatatcgcatgcggggcgacatgcaacttttccagaccttctggtttctctaccataagggccacccaccctcggagccctgtggcacgccctgccgtctggctactctttgtgcccagctctctgcccgtgctgacagccctgctctgtgccgccacctgatgccagatgggagcctcccagaggcccagagcctgtggccaaggccactgttttgctaggcggccgctaatcagccataccacatttgtagaggttttacttgctttaaaaaacctcccacacctccccctgaacctgaaacataaaatgaatgcaattgttgttgttaacttgtttattgcagcttataatggttacaaataaagcaatagcatcacaaatttcacaaataaagcatttttttcactgcattctagttgtggtttgtccaaactcatcaatgtatcttatcatgtc

SEQ ID NO: 749 - DNA, 2083 bp, synthetic construct
  source 1..2083: mol_type = other DNA
  misc_feature 1..87: note = mROR signal peptide
  misc_feature 88..1842: note = Human ASM
  misc_feature 1854..2083: note = SV40 poly-A
atgcacagacctagacgtcgtggaactcgtccacctccactggcactgctcgctgctctcctcctggctgcacgtggtgctgatgcactggctctgtctgactctcgggttctctgggctccggcagaggctcaccctctttctccccaaggccatcctgccaggttacatcgcatagtgccccggctccgagatgtctttgggtgggggaacctcacctgcccaatctgcaaaggtctattcaccgccatcaacctcgggctgaagaaggaacccaatgtggctcgcgtgggctccgtggccatcaagctgtgcaatctgctgaagatagcaccacctgccgtgtgccaatccattgtccacctctttgaggatgacatggtggaggtgtggagacgctcagtgctgagcccatctgaggcctgtggcctgctcctgggctccacctgtgggcactgggacattttctcatcttggaacatctctttgcctactgtgccgaagccgccccccaaaccccctagccccccagccccaggtgctcctgtcagccgcatcctcttcctcactgacctgcactgggatcatgactacctggagggcacggaccctgactgtgcagacccactgtgctgccgccggggttctggcctgccgcccgcatccaggccaggtgccggatactggggcgaatacagcaagtgtgacctgcccctgaggaccctggagagcctgttgagtgggctgggcccagccggcccttttgatatggtgtactggacaggagacatccccgcacatgatgtctggcaccagactcgtcaggaccaactgcgggccctgaccaccgtcacagcacttgtgaggaagttcctggggccagtgccagtgtaccctgctgtgggtaaccatgaaagcacacctgtcaatagcttccctccccccttcattgagggcaaccactcctcccgctggctctatgaagcgatggccaaggcttgggagccctggctgcctgccgaagccctgcgcaccctcagaattggggggttctatgctctttccccataccccggtctccgcctcatctctctcaatatgaatttttgttcccgtgagaacttctggctcttgatcaactccacggatcccgcaggacagctccagtggctggtgggggagcttcaggctgctgaggatcgaggagacaaagtgcatataattggccacattcccccagggcactgtctgaagagctggagctggaattattaccgaattgtagccaggtatgagaacaccctggctgctcagttctttggccacactcatgtggatgaatttgaggtcttctatgatgaagagactctgagccggccgctggctgtagccttcctggcacccagtgcaactacctacatcggccttaatcctggttaccgtgtgtaccaaatagatggaaactactccgggagctctcacgtggtcctggaccatgagacctacatcctgaatctgacccaggcaaacataccgggagccataccgcactggcagcttctctacagggctcgagaaacctatgggctgcccaacacactgcctaccgcctggcacaacctggtatatcgcatgcggggcgacatgcaacttttccagaccttctggtttctctaccataagggccacccaccctcggagccctgtggcacgccctgccgtctggctactctttgtgcccagctctctgcccgtgctgacagccctgctctgtgccgccacctgatgccagatgggagcctcccagaggcccagagcctgtggccaaggccactgttttgctaggcggccgctaatcagccataccacatttgtagaggttttacttgctttaaaaaacctcccacacctccccctgaacctgaaacataaaatgaatgcaattgttgttgttaacttgtttattgcagcttataatggttacaaataaagcaatagcatcacaaatttcacaaataaagcatttttttcactgcattctagttgtggtttgtccaaactcatcaatgtatcttatcatgtc

SEQ ID NO: 750 - DNA, 2785 bp, synthetic construct
  source 1..2785: mol_type = other DNA
  misc_feature 1..87: note = mROR signal peptide
  misc_feature 88..1797: note = Human ASM
  misc_feature 1798..1812: note = G4S linker
  misc_feature 1813..2544: note = 12847scfv
  misc_feature 2556..2785: note = SV40 poly-A
atgcacagacctagacgtcgtggaactcgtccacctccactggcactgctcgctgctctcctcctggctgcacgtggtgctgatgcacaccctctttctccccaaggccatcctgccaggttacatcgcatagtgccccggctccgagatgtctttgggtgggggaacctcacctgcccaatctgcaaaggtctattcaccgccatcaacctcgggctgaagaaggaacccaatgtggctcgcgtgggctccgtggccatcaagctgtgcaatctgctgaagatagcaccacctgccgtgtgccaatccattgtccacctctttgaggatgacatggtggaggtgtggagacgctcagtgctgagcccatctgaggcctgtggcctgctcctgggctccacctgtgggcactgggacattttctcatcttggaacatctctttgcctactgtgccgaagccgccccccaaaccccctagccccccagccccaggtgcccctgtcagccgcatcctcttcctcactgacctgcactgggatcatgactacctggagggcacggaccctgactgtgcagacccactgtgctgccgccggggttctggcctgccgcccgcatcccggccaggtgccggatactggggcgaatacagcaagtgtgacctgcccctgaggaccctggagagcctgttgagtgggctgggcccagccggcccttttgatatggtgtactggacaggagacatccccgcacatgatgtctggcaccagactcgtcaggaccaactgcgggccctgaccaccgtcacagcacttgtgaggaagttcctggggccagtgccagtgtaccctgctgtgggtaaccatgaaagcacacctgtcaatagcttccctccccccttcattgagggcaaccactcctcccgctggctctatgaagcgatggccaaggcttgggagccctggctgcctgccgaagccctgcgcaccctcagaattggggggttctatgctctttccccataccccggtctccgcctcatctctctcaatatgaatttttgttcccgtgagaacttctggctcttgatcaactccacggatcccgcaggacagctccagtggctggtgggggagcttcaggctgctgaggatcgaggagacaaagtgcatataattggccacattcccccagggcactgtctgaagagctggagctggaattattaccgaattgtagccaggtatgagaacaccctggctgctcagttctttggccacactcatgtggatgaatttgaggtcttctatgatgaagagactctgagccggccgctggctgtagccttcctggcacccagtgcaactacctacatcggccttaatcctggttaccgtgtgtaccaaatagatggaaactactccgggagctctcacgtggtcctggaccatgagacctacatcctgaatctgacccaggcaaacataccgggagccataccgcactggcagcttctctacagggctcgagaaacctatgggctgcccaacacactgcctaccgcctggcacaacctggtatatcgcatgcggggcgacatgcaacttttccagaccttctggtttctctaccataagggccacccaccctcggagccctgtggcacgccctgccgtctggctactctttgtgcccagctctctgcccgtgctgacagccctgctctgtgccgccacctgatgccagatgggagcctcccagaggcccagagcctgtggccaaggccactgttttgcggaggtggtggaagtgacatccagatgacccagtctccatcctccctgtctgcatctgtaggagacagagtcaccatcacttgccgggcaagtcagagcattagcagctatttaaattggtatcagcagaaaccagggaaagcccctaagctcctgatctatgctgcatccagtttgcaaagtggggtcccgtcaaggttcagtggcagtggatctgggacagatttcactctcaccatcagcagtctgcaacctgaagattttgcaacttactactgtcaacagagttacagtacccctccgatcaccttcggccaagggacacgactggagattaaaggcggcggcggaagcggagggggaggatcaggaggaggcggatccgaagtgcagctggtggagtctgggggaggcttggttcagcctggcaggtccctgagactctcctgtgcagcctctggattcacctttgatgattatgccatgaactgggtccggcaagctccagggaagggcctggagtgggtctcaggtattagttggagtagtggtagcatggactatgcggactctgtgaagggccgattcaccatctccagagacaacgccaaaaactccctgtatctgcaaatgaacagtctgagaactgaggacacggccttatattactgtgcaaaagctagggaagttggagactactacggtatggacgtctggggccaagggaccacggtcaccgtctcctcataggcggccgctaatcagccataccacatttgtagaggttttacttgctttaaaaaacctcccacacctccccctgaacctgaaacataaaatgaatgcaattgttgttgttaacttgtttattgcagcttataatggttacaaataaagcaatagcatcacaaatttcacaaataaagcatttttttcactgcattctagttgtggtttgtccaaactcatcaatgtatcttatcatgtc

SEQ ID NO: 751 - DNA, 2785 bp, synthetic construct
  source 1..2785: mol_type = other DNA
  misc_feature 1..87: note = mROR signal peptide
  misc_feature 88..819: note = 12847scfv
  misc_feature 820..834: note = G4S linker
  misc_feature 835..2544: note = Human ASM
  misc_feature 2556..2785: note = SV40 poly-A
atgcacagacctagacgtcgtggaactcgtccacctccactggcactgctcgctgctctcctcctggctgcacgtggtgctgatgcagacatccagatgacccagtctccatcctccctgtctgcatctgtaggagacagagtcaccatcacttgccgggcaagtcagagcattagcagctatttaaattggtatcagcagaaaccagggaaagcccctaagctcctgatctatgctgcatccagtttgcaaagtggggtcccgtcaaggttcagtggcagtggatctgggacagatttcactctcaccatcagcagtctgcaacctgaagattttgcaacttactactgtcaacagagttacagtacccctccgatcaccttcggccaagggacacgactggagattaaaggcggcggcggaagcggagggggaggatcaggaggaggcggatccgaagtgcagctggtggagtctgggggaggcttggttcagcctggcaggtccctgagactctcctgtgcagcctctggattcacctttgatgattatgccatgaactgggtccggcaagctccagggaagggcctggagtgggtctcaggtattagttggagtagtggtagcatggactatgcggactctgtgaagggccgattcaccatctccagagacaacgccaaaaactccctgtatctgcaaatgaacagtctgagaactgaggacacggccttatattactgtgcaaaagctagggaagttggagactactacggtatggacgtctggggccaagggaccacggtcaccgtctcctcaggaggtggtggaagtcaccctctttctccccaaggccatcctgccaggttacatcgcatagtgccccggctccgagatgtctttgggtgggggaacctcacctgcccaatctgcaaaggtctattcaccgccatcaacctcgggctgaagaaggaacccaatgtggctcgcgtgggctccgtggccatcaagctgtgcaatctgctgaagatagcaccacctgccgtgtgccaatccattgtccacctctttgaggatgacatggtggaggtgtggagacgctcagtgctgagcccatctgaggcctgtggcctgctcctgggctccacctgtgggcactgggacattttctcatcttggaacatctctttgcctactgtgccgaagccgccccccaaaccccctagccccccagccccaggtgcccctgtcagccgcatcctcttcctcactgacctgcactgggatcatgactacctggagggcacggaccctgactgtgcagacccactgtgctgccgccggggttctggcctgccgcccgcatcccggccaggtgccggatactggggcgaatacagcaagtgtgacctgcccctgaggaccctggagagcctgttgagtgggctgggcccagccggcccttttgatatggtgtactggacaggagacatccccgcacatgatgtctggcaccagactcgtcaggaccaactgcgggccctgaccaccgtcacagcacttgtgaggaagttcctggggccagtgccagtgtaccctgctgtgggtaaccatgaaagcacacctgtcaatagcttccctccccccttcattgagggcaaccactcctcccgctggctctatgaagcgatggccaaggcttgggagccctggctgcctgccgaagccctgcgcaccctcagaattggggggttctatgctctttccccataccccggtctccgcctcatctctctcaatatgaatttttgttcccgtgagaacttctggctcttgatcaactccacggatcccgcaggacagctccagtggctggtgggggagcttcaggctgctgaggatcgaggagacaaagtgcatataattggccacattcccccagggcactgtctgaagagctggagctggaattattaccgaattgtagccaggtatgagaacaccctggctgctcagttctttggccacactcatgtggatgaatttgaggtcttctatgatgaagagactctgagccggccgctggctgtagccttcctggcacccagtgcaactacctacatcggccttaatcctggttaccgtgtgtaccaaatagatggaaactactccgggagctctcacgtggtcctggaccatgagacctacatcctgaatctgacccaggcaaacataccgggagccataccgcactggcagcttctctacagggctcgagaaacctatgggctgcccaacacactgcctaccgcctggcacaacctggtatatcgcatgcggggcgacatgcaacttttccagaccttctggtttctctaccataagggccacccaccctcggagccctgtggcacgccctgccgtctggctactctttgtgcccagctctctgcccgtgctgacagccctgctctgtgccgccacctgatgccagatgggagcctcccagaggcccagagcctgtggccaaggccactgttttgctaggcggccgctaatcagccataccacatttgtagaggttttacttgctttaaaaaacctcccacacctccccctgaacctgaaacataaaatgaatgcaattgttgttgttaacttgtttattgcagcttataatggttacaaataaagcaatagcatcacaaatttcacaaataaagcatttttttcactgcattctagttgtggtttgtccaaactcatcaatgtatcttatcatgtc

SEQ ID NO: 752 - protein, 4 aa, synthetic construct
LLNE

SEQ ID NO: 753 - protein, 8 aa, synthetic construct
DSTDFTGT

SEQ ID NO: 754 - protein, 9 aa, synthetic construct
VKHPVTGQF

SEQ ID NO: 755 - protein, 7 aa, synthetic construct
IERIPEL

SEQ ID NO: 756 - protein, 18 aa, synthetic construct
LNENSYVPREAGSQKDEN

SEQ ID NO: 757 - protein, 8 aa, synthetic construct
IVDKNGRL

SEQ ID NO: 758 - protein, 10 aa, synthetic construct
IVDKNGRLVY

SEQ ID NO: 759 - protein, 5 aa, synthetic construct
DQTKF

SEQ ID NO: 760 - protein, 8 aa, synthetic construct
LVENPGGY

SEQ ID NO: 761 - protein, 9 aa, synthetic construct
PIVNAELSF

SEQ ID NO: 762 - protein, 9 aa, synthetic construct
PYLGTTMDT

SEQ ID NO: 763 - protein, 220 aa, synthetic construct
PCPAPELLGGPSVFLFPPKPKDTLMISRTPEVTCVVVDVSHEDPEVKFNWYVDGVEVHNAKTKPREEQYNSTYRVVSVLTVLHQDWLNGKEYKCKVSNKALPAPIEKTISKAKGQPREPQVYTLPPSRDELTKNQVSLTCLVKGFYPSDIAVEWESNGQPENNYKTTPPVLDSDGSFFLYSKLTVDKSRWQQGNVFSCSVMHEALHNHYTQKSLSLSPGK

SEQ ID NO: 764 - protein, 451 aa, synthetic construct
EVQLVESGGGLVQPGGSLRLSCAASGFAFSSYAMTWVRQAPGKGLEWVSVISGTGGSTYYADSVKGRFTISRDNSKNTLYLQMNSLRAEDTAVYYCAKGGAARRMEYFQYWGQGTLVTVSSASTKGPSVFPLAPSSKSTSGGTAALGCLVKDYFPEPVTVSWNSGALTSGVHTFPAVLQSSGLYSLSSVVTVPSSSLGTQTYICNVNHKPSNTKVDKKVEPKSCDKTHTCPPCPAPELLGGPSVFLFPPKPKDTLMISRTPEVTCVVVDVSHEDPEVKFNWYVDGVEVHNAKTKPREEQYNSTYRVVSVLTVLHQDWLNGKEYKCKVSNKALPAPIEKTISKAKGQPREPQVYTLPPSRDELTKNQVSLTCLVKGFYPSDIAVEWESNGQPENNYKTTPPVLDSDGSFFLYSKLTVDKSRWQQGNVFSCSVMHEALHNHYTQKSLSLSPGK

SEQ ID NO: 765 - protein, 451 aa, synthetic construct
EVQLVESGGGLVQPGGSLRLSCAASGFTFNSYAMTWVRQAPGKGLEWVSFIGGSTGNTYYAGSVKGRFTISSDNSKKTLYLQMNSLRAEDTAVYYCAKGGAARRMEYFQHWGQGTLVTVSSASTKGPSVFPLAPSSKSTSGGTAALGCLVKDYFPEPVTVSWNSGALTSGVHTFPAVLQSSGLYSLSSVVTVPSSSLGTQTYICNVNHKPSNTKVDKKVEPKSCDKTHTCPPCPAPELLGGPSVFLFPPKPKDTLMISRTPEVTCVVVDVSHEDPEVKFNWYVDGVEVHNAKTKPREEQYNSTYRVVSVLTVLHQDWLNGKEYKCKVSNKALPAPIEKTISKAKGQPREPQVYTLPPSRDELTKNQVSLTCLVKGFYPSDIAVEWESNGQPENNYKTTPPVLDSDGSFFLYSKLTVDKSRWQQGNVFSCSVMHEALHNHYTQKSLSLSPGK

SEQ ID NO: 766 - protein, 452 aa, synthetic construct
QVQLVESGGGVVQPGRSLRLSCAASGFTFTTYGMHWVRQAPGKGLEWVAVIWYDGSNKYYGDSVKGRFTISRDNSKNTLYLQMNSLRVDDTAVYYCTRTHGYTRSSDGFDYWGQGTLVTVSSASTKGPSVFPLAPSSKSTSGGTAALGCLVKDYFPEPVTVSWNSGALTSGVHTFPAVLQSSGLYSLSSVVTVPSSSLGTQTYICNVNHKPSNTKVDKKVEPKSCDKTHTCPPCPAPELLGGPSVFLFPPKPKDTLMISRTPEVTCVVVDVSHEDPEVKFNWYVDGVEVHNAKTKPREEQYNSTYRVVSVLTVLHQDWLNGKEYKCKVSNKALPAPIEKTISKAKGQPREPQVYTLPPSRDELTKNQVSLTCLVKGFYPSDIAVEWESNGQPENNYKTTPPVLDSDGSFFLYSKLTVDKSRWQQGNVFSCSVMHEALHNHYTQKSLSLSPGK

SEQ ID NO: 767 - protein, 453 aa, synthetic construct
EVQLVESGGGLVQPGRSLRLSCAASGFTFDDKAMHWVRQVPGKGLEWISGISWNSGTIGYADSVKGRFIISRDNAKNSLYLQMNSLRAEDTALYYCAKDGDTSGWYWYGLDVWGQGTTVTVSSASTKGPSVFPLAPSSKSTSGGTAALGCLVKDYFPEPVTVSWNSGALTSGVHTFPAVLQSSGLYSLSSVVTVPSSSLGTQTYICNVNHKPSNTKVDKKVEPKSCDKTHTCPPCPAPELLGGPSVFLFPPKPKDTLMISRTPEVTCVVVDVSHEDPEVKFNWYVDGVEVHNAKTKPREEQYNSTYRVVSVLTVLHQDWLNGKEYKCKVSNKALPAPIEKTISKAKGQPREPQVYTLPPSRDELTKNQVSLTCLVKGFYPSDIAVEWESNGQPENNYKTTPPVLDSDGSFFLYSKLTVDKSRWQQGNVFSCSVMHEALHNHYTQKSLSLSPGK

SEQ ID NO: 768 - protein, 450 aa, synthetic construct
QVQLVESGGGVVQPGRSLRLSCIASGFTFSVYGIHWVRQAPGKGLEWMAVISHDGNIKHYADSVKGRFTISRDNSKNTLYLQINSLRTEDTAVYYCAKDTWNSLDTFDIWGQGTMVTVSSASTKGPSVFPLAPSSKSTSGGTAALGCLVKDYFPEPVTVSWNSGALTSGVHTFPAVLQSSGLYSLSSVVTVPSSSLGTQTYICNVNHKPSNTKVDKKVEPKSCDKTHTCPPCPAPELLGGPSVFLFPPKPKDTLMISRTPEVTCVVVDVSHEDPEVKFNWYVDGVEVHNAKTKPREEQYNSTYRVVSVLTVLHQDWLNGKEYKCKVSNKALPAPIEKTISKAKGQPREPQVYTLPPSRDELTKNQVSLTCLVKGFYPSDIAVEWESNGQPENNYKTTPPVLDSDGSFFLYSKLTVDKSRWQQGNVFSCSVMHEALHNHYTQKSLSLSPGK

SEQ ID NO: 769 - protein, 450 aa, synthetic construct
QVTLRESGPALVKPSQTLTLTCTFSGFSLNTYGMFVSWIRQPPGKALEWLAHIHWDDDKYYSTSLKTRLTISKDTSKNQVVLTMTNMDPVDTATYYCARGHNNLNYIIHWGQGTLVTVSSASTKGPSVFPLAPSSKSTSGGTAALGCLVKDYFPEPVTVSWNSGALTSGVHTFPAVLQSSGLYSLSSVVTVPSSSLGTQTYICNVNHKPSNTKVDKKVEPKSCDKTHTCPPCPAPELLGGPSVFLFPPKPKDTLMISRTPEVTCVVVDVSHEDPEVKFNWYVDGVEVHNAKTKPREEQYNSTYRVVSVLTVLHQDWLNGKEYKCKVSNKALPAPIEKTISKAKGQPREPQVYTLPPSRDELTKNQVSLTCLVKGFYPSDIAVEWESNGQPENNYKTTPPVLDSDGSFFLYSKLTVDKSRWQQGNVFSCSVMHEALHNHYTQKSLSLSPGK

SEQ ID NO: 770 - protein, 446 aa, synthetic construct
EVQLVESGGGLVQPGGSLRLSCAVSGFIFSSYEMNWVRQAPGKGLEWVSYISSSGSTIFYADSVKGRFTISRDNAKNSLYLQMNSLRAEDTAVYYCVSGVVLFDVWGQGTMVTVSSASTKGPSVFPLAPSSKSTSGGTAALGCLVKDYFPEPVTVSWNSGALTSGVHTFPAVLQSSGLYSLSSVVTVPSSSLGTQTYICNVNHKPSNTKVDKKVEPKSCDKTHTCPPCPAPELLGGPSVFLFPPKPKDTLMISRTPEVTCVVVDVSHEDPEVKFNWYVDGVEVHNAKTKPREEQYNSTYRVVSVLTVLHQDWLNGKEYKCKVSNKALPAPIEKTISKAKGQPREPQVYTLPPSRDELTKNQVSLTCLVKGFYPSDIAVEWESNGQPENNYKTTPPVLDSDGSFFLYSKLTVDKSRWQQGNVFSCSVMHEALHNHYTQKSLSLSPGK

SEQ ID NO: 771 - protein, 455 aa, synthetic construct
EVQLVESGGGLVQPGGSLRLSCAASGFTFSNYWMTWVRQAPGKGLEWVANIKEDGSEKDYVDSVKGRFTISRDNAKNSLYLQMNSLRGEDTAVYYCARDGEQLVDYYYYYVMDVWGQGTTVTVSSASTKGPSVFPLAPSSKSTSGGTAALGCLVKDYFPEPVTVSWNSGALTSGVHTFPAVLQSSGLYSLSSVVTVPSSSLGTQTYICNVNHKPSNTKVDKKVEPKSCDKTHTCPPCPAPELLGGPSVFLFPPKPKDTLMISRTPEVTCVVVDVSHEDPEVKFNWYVDGVEVHNAKTKPREEQYNSTYRVVSVLTVLHQDWLNGKEYKCKVSNKALPAPIEKTISKAKGQPREPQVYTLPPSRDELTKNQVSLTCLVKGFYPSDIAVEWESNGQPENNYKTTPPVLDSDGSFFLYSKLTVDKSRWQQGNVFSCSVMHEALHNHYTQKSLSLSPGK

SEQ ID NO: 772 - protein, 457 aa, synthetic construct
EVQLVESGGGLVQPGRSLRLSCAASGFTFDDYAMHWVRQAPGKGLEWVSGISWNSGYIGYADSVKGRFTISRDNAENSLHLQMNSLRAEDTALYYCARGGSTLVRGVKGGYYGMDVWGQGTTVTVSSASTKGPSVFPLAPSSKSTSGGTAALGCLVKDYFPEPVTVSWNSGALTSGVHTFPAVLQSSGLYSLSSVVTVPSSSLGTQTYICNVNHKPSNTKVDKKVEPKSCDKTHTCPPCPAPELLGGPSVFLFPPKPKDTLMISRTPEVTCVVVDVSHEDPEVKFNWYVDGVEVHNAKTKPREEQYNSTYRVVSVLTVLHQDWLNGKEYKCKVSNKALPAPIEKTISKAKGQPREPQVYTLPPSRDELTKNQVSLTCLVKGFYPSDIAVEWESNGQPENNYKTTPPVLDSDGSFFLYSKLTVDKSRWQQGNVFSCSVMHEALHNHYTQKSLSLSPGK

SEQ ID NO: 773 - protein, 447 aa, synthetic construct
QVQLVESGGGVVQPGRSLRLSCAASGFTFSSYGMHWVRQAPGKGLEWVAVIWYDGSNKYYADSVKGRFTISRDISKNTLYLQMNSLRAEDTAVYYCAGQLDLFFDYWGQGTLVTVSSASTKGPSVFPLAPSSKSTSGGTAALGCLVKDYFPEPVTVSWNSGALTSGVHTFPAVLQSSGLYSLSSVVTVPSSSLGTQTYICNVNHKPSNTKVDKKVEPKSCDKTHTCPPCPAPELLGGPSVFLFPPKPKDTLMISRTPEVTCVVVDVSHEDPEVKFNWYVDGVEVHNAKTKPREEQYNSTYRVVSVLTVLHQDWLNGKEYKCKVSNKALPAPIEKTISKAKGQPREPQVYTLPPSRDELTKNQVSLTCLVKGFYPSDIAVEWESNGQPENNYKTTPPVLDSDGSFFLYSKLTVDKSRWQQGNVFSCSVMHEALHNHYTQKSLSLSPGK

SEQ ID NO: 774 - protein, 455 aa, synthetic construct
EVQLVESGGGLVQPGGSLRLSCTASGFTFSNYWMTWVRQAPGKGLEWVANIKEDGSEKEYVDSVKGRFTISRDNAKNSLYLQMNSLRGEDTAVYYCARDGEQLVDYYYYYVMDVWGQGTTVTVSSASTKGPSVFPLAPSSKSTSGGTAALGCLVKDYFPEPVTVSWNSGALTSGVHTFPAVLQSSGLYSLSSVVTVPSSSLGTQTYICNVNHKPSNTKVDKKVEPKSCDKTHTCPPCPAPELLGGPSVFLFPPKPKDTLMISRTPEVTCVVVDVSHEDPEVKFNWYVDGVEVHNAKTKPREEQYNSTYRVVSVLTVLHQDWLNGKEYKCKVSNKALPAPIEKTISKAKGQPREPQVYTLPPSRDELTKNQVSLTCLVKGFYPSDIAVEWESNGQPENNYKTTPPVLDSDGSFFLYSKLTVDKSRWQQGNVFSCSVMHEALHNHYTQKSLSLSPGK

SEQ ID NO: 775 - protein, 451 aa, synthetic construct
EVQLVESGGGLVQPGGSLRLSCATSGFTFTSYDMKWVRQAPGLGLEWVSAISGSGGNTYYADSVKGRFTISRDNSRNTLYLQMNSLRAEDTAVYYCTRSHDFGAFDYFDYWGQGTLVTVSSASTKGPSVFPLAPSSKSTSGGTAALGCLVKDYFPEPVTVSWNSGALTSGVHTFPAVLQSSGLYSLSSVVTVPSSSLGTQTYICNVNHKPSNTKVDKKVEPKSCDKTHTCPPCPAPELLGGPSVFLFPPKPKDTLMISRTPEVTCVVVDVSHEDPEVKFNWYVDGVEVHNAKTKPREEQYNSTYRVVSVLTVLHQDWLNGKEYKCKVSNKALPAPIEKTISKAKGQPREPQVYTLPPSRDELTKNQVSLTCLVKGFYPSDIAVEWESNGQPENNYKTTPPVLDSDGSFFLYSKLTVDKSRWQQGNVFSCSVMHEALHNHYTQKSLSLSPGK

SEQ ID NO: 776 - protein, 452 aa, synthetic construct
EVQLVESGGDLVQPGRSLRLSCAASGFTFDDYAMHWVRQAPGKGLEWVSGISWNSATRVYADSVKGRFTISRDNAKNFLYLQMNSLRSEDTALYHCAKDMDISLGYYGLDVWGQGTTVTVSSASTKGPSVFPLAPSSKSTSGGTAALGCLVKDYFPEPVTVSWNSGALTSGVHTFPAVLQSSGLYSLSSVVTVPSSSLGTQTYICNVNHKPSNTKVDKKVEPKSCDKTHTCPPCPAPELLGGPSVFLFPPKPKDTLMISRTPEVTCVVVDVSHEDPEVKFNWYVDGVEVHNAKTKPREEQYNSTYRVVSVLTVLHQDWLNGKEYKCKVSNKALPAPIEKTISKAKGQPREPQVYTLPPSRDELTKNQVSLTCLVKGFYPSDIAVEWESNGQPENNYKTTPPVLDSDGSFFLYSKLTVDKSRWQQGNVFSCSVMHEALHNHYTQKSLSLSPGK

SEQ ID NO: 777 - protein, 454 aa, synthetic construct
QITLKESGPTLVKPTQTLTLTCTFSGFSLSTSGVGVVWIRQPPGKALEWLALIYWNDHKRYSPSLGSRLTITKDTSKNQVVLTMTNMDPVDTATYYCAHYSGSYSYYYYGLDVWGQGTTVTVSSASTKGPSVFPLAPSSKSTSGGTAALGCLVKDYFPEPVTVSWNSGALTSGVHTFPAVLQSSGLYSLSSVVTVPSSSLGTQTYICNVNHKPSNTKVDKKVEPKSCDKTHTCPPCPAPELLGGPSVFLFPPKPKDTLMISRTPEVTCVVVDVSHEDPEVKFNWYVDGVEVHNAKTKPREEQYNSTYRVVSVLTVLHQDWLNGKEYKCKVSNKALPAPIEKTISKAKGQPREPQVYTLPPSRDELTKNQVSLTCLVKGFYPSDIAVEWESNGQPENNYKTTPPVLDSDGSFFLYSKLTVDKSRWQQGNVFSCSVMHEALHNHYTQKSLSLSPGK

SEQ ID NO: 778 - protein, 451 aa, synthetic construct
EVQLLESGGALVQPGGSLRLSCAASGFTFTSYAMHWVRQAPGKGLEWVSSIRGSGGGTYSADSVKGRFTISRDNSRDTLYLQMNSVRAEDTAVYYCARSHDYGAFDFFDYWGQGTLVTVSSASTKGPSVFPLAPSSKSTSGGTAALGCLVKDYFPEPVTVSWNSGALTSGVHTFPAVLQSSGLYSLSSVVTVPSSSLGTQTYICNVNHKPSNTKVDKKVEPKSCDKTHTCPPCPAPELLGGPSVFLFPPKPKDTLMISRTPEVTCVVVDVSHEDPEVKFNWYVDGVEVHNAKTKPREEQYNSTYRVVSVLTVLHQDWLNGKEYKCKVSNKALPAPIEKTISKAKGQPREPQVYTLPPSRDELTKNQVSLTCLVKGFYPSDIAVEWESNGQPENNYKTTPPVLDSDGSFFLYSKLTVDKSRWQQGNVFSCSVMHEALHNHYTQKSLSLSPGK

SEQ ID NO: 779 - protein, 446 aa, synthetic construct
QVQLVESGGGLVKPGGSLRLSCAASGFTFSDYFMSWIRQAPGKGLEWVSYISSTGSTINYADSVKGRFTISRDNVKNSLYLQMTSLRVEDTAVYYCTRDNWNYEYWGQGTLVTVSSASTKGPSVFPLAPSSKSTSGGTAALGCLVKDYFPEPVTVSWNSGALTSGVHTFPAVLQSSGLYSLSSVVTVPSSSLGTQTYICNVNHKPSNTKVDKKVEPKSCDKTHTCPPCPAPELLGGPSVFLFPPKPKDTLMISRTPEVTCVVVDVSHEDPEVKFNWYVDGVEVHNAKTKPREEQYNSTYRVVSVLTVLHQDWLNGKEYKCKVSNKALPAPIEKTISKAKGQPREPQVYTLPPSRDELTKNQVSLTCLVKGFYPSDIAVEWESNGQPENNYKTTPPVLDSDGSFFLYSKLTVDKSRWQQGNVFSCSVMHEALHNHYTQKSLSLSPGK

SEQ ID NO: 780 - protein, 453 aa, synthetic construct
QLQLQESGPGLVKPSETLSLTCTVSGESISSNTYYWGWIRQPPGKGLEWIGSIDYSGTTNYNPSLKSRVTISVDTSRNHFSLRLRSVTAADTAVYYCAREWGNYGYYYGMDVWGQGTTVTVSSASTKGPSVFPLAPSSKSTSGGTAALGCLVKDYFPEPVTVSWNSGALTSGVHTFPAVLQSSGLYSLSSVVTVPSSSLGTQTYICNVNHKPSNTKVDKKVEPKSCDKTHTCPPCPAPELLGGPSVFLFPPKPKDTLMISRTPEVTCVVVDVSHEDPEVKFNWYVDGVEVHNAKTKPREEQYNSTYRVVSVLTVLHQDWLNGKEYKCKVSNKALPAPIEKTISKAKGQPREPQVYTLPPSRDELTKNQVSLTCLVKGFYPSDIAVEWESNGQPENNYKTTPPVLDSDGSFFLYSKLTVDKSRWQQGNVFSCSVMHEALHNHYTQKSLSLSPGK

SEQ ID NO: 781 - protein, 448 aa, synthetic construct
QVQLVQSGAEVKKPGSSVRVSCKASRGTFSSYAISWVRQAPGQGLEWMGGIIPIFGTANYAQKFLARVTITADESTSTAYMELSSLRSEDTAVYYCAREKGWNYFDYWGQGTLVTVSSASTKGPSVFPLAPSSKSTSGGTAALGCLVKDYFPEPVTVSWNSGALTSGVHTFPAVLQSSGLYSLSSVVTVPSSSLGTQTYICNVNHKPSNTKVDKKVEPKSCDKTHTCPPCPAPELLGGPSVFLFPPKPKDTLMISRTPEVTCVVVDVSHEDPEVKFNWYVDGVEVHNAKTKPREEQYNSTYRVVSVLTVLHQDWLNGKEYKCKVSNKALPAPIEKTISKAKGQPREPQVYTLPPSRDELTKNQVSLTCLVKGFYPSDIAVEWESNGQPENNYKTTPPVLDSDGSFFLYSKLTVDKSRWQQGNVFSCSVMHEALHNHYTQKSLSLSPGK

SEQ ID NO: 782 - protein, 453 aa, synthetic construct
QVQLVESGGGLVKPGGSLRLSCAASGFTFSDYYMNWIRQAPGKGLEWVSYISSSGTTIYYADSVKGRFTISRDNAKKSLYLEMNSLRAEDTAVYYCAREGYGNDYYYYGIDVWGQGTTVTVSSASTKGPSVFPLAPSSKSTSGGTAALGCLVKDYFPEPVTVSWNSGALTSGVHTFPAVLQSSGLYSLSSVVTVPSSSLGTQTYICNVNHKPSNTKVDKKVEPKSCDKTHTCPPCPAPELLGGPSVFLFPPKPKDTLMISRTPEVTCVVVDVSHEDPEVKFNWYVDGVEVHNAKTKPREEQYNSTYRVVSVLTVLHQDWLNGKEYKCKVSNKALPAPIEKTISKAKGQPREPQVYTLPPSRDELTKNQVSLTCLVKGFYPSDIAVEWESNGQPENNYKTTPPVLDSDGSFFLYSKLTVDKSRWQQGNVFSCSVMHEALHNHYTQKSLSLSPGK

SEQ ID NO: 783 - protein, 452 aa, synthetic construct
QVQLVESGGGVVQPGRSLRLSCAASGFTFSSFGMHWVRQAPGKGLEWVIFISYDGSDKYYADSVKGRFAISRDSSKNTLYLQMNSLRAEDTAVYYCAKENGILTDSYGMDVWGQGTTVTVSSASTKGPSVFPLAPSSKSTSGGTAALGCLVKDYFPEPVTVSWNSGALTSGVHTFPAVLQSSGLYSLSSVVTVPSSSLGTQTYICNVNHKPSNTKVDKKVEPKSCDKTHTCPPCPAPELLGGPSVFLFPPKPKDTLMISRTPEVTCVVVDVSHEDPEVKFNWYVDGVEVHNAKTKPREEQYNSTYRVVSVLTVLHQDWLNGKEYKCKVSNKALPAPIEKTISKAKGQPREPQVYTLPPSRDELTKNQVSLTCLVKGFYPSDIAVEWESNGQPENNYKTTPPVLDSDGSFFLYSKLTVDKSRWQQGNVFSCSVMHEALHNHYTQKSLSLSPGK

SEQ ID NO: 784 - protein, 454 aa, synthetic construct
QVQLVQSGAEVKKPGASVKVSCKASGYTFTSYGISWVRQAPGQGLEWMGWISVYHGNTNYAQKFQGRVTMTTDTSTSTAYMELRSLRSDDTAVYYCAREGYYDFWSGYYPFDYWGQGTLVTVSSASTKGPSVFPLAPSSKSTSGGTAALGCLVKDYFPEPVTVSWNSGALTSGVHTFPAVLQSSGLYSLSSVVTVPSSSLGTQTYICNVNHKPSNTKVDKKVEPKSCDKTHTCPPCPAPELLGGPSVFLFPPKPKDTLMISRTPEVTCVVVDVSHEDPEVKFNWYVDGVEVHNAKTKPREEQYNSTYRVVSVLTVLHQDWLNGKEYKCKVSNKALPAPIEKTISKAKGQPREPQVYTLPPSRDELTKNQVSLTCLVKGFYPSDIAVEWESNGQPENNYKTTPPVLDSDGSFFLYSKLTVDKSRWQQGNVFSCSVMHEALHNHYTQKSLSLSPGK

SEQ ID NO: 785 - protein, 448 aa, synthetic construct
EVQLVESGGGLIQPGGSLRLSCEASGFTFRNYEMNWVRQAPGKGLEWVSYISSSGNMKDYAESVKGRFTISRDNVKNSLQLQMNSLRVEDTAVYYCARDEFPYGMDVWGQGTTVTVSSASTKGPSVFPLAPSSKSTSGGTAALGCLVKDYFPEPVTVSWNSGALTSGVHTFPAVLQSSGLYSLSSVVTVPSSSLGTQTYICNVNHKPSNTKVDKKVEPKSCDKTHTCPPCPAPELLGGPSVFLFPPKPKDTLMISRTPEVTCVVVDVSHEDPEVKFNWYVDGVEVHNAKTKPREEQYNSTYRVVSVLTVLHQDWLNGKEYKCKVSNKALPAPIEKTISKAKGQPREPQVYTLPPSRDELTKNQVSLTCLVKGFYPSDIAVEWESNGQPENNYKTTPPVLDSDGSFFLYSKLTVDKSRWQQGNVFSCSVMHEALHNHYTQKSLSLSPGK

SEQ ID NO: 786 - protein, 451 aa, synthetic construct
EVQLVESGGGLVQPGRSLRLSCAASGFTFDDYAMNWVRQAPGKGLEWVSGISWSSGSMDYADSVKGRFTISRDNAKNSLYLQMNSLRTEDTALYYCAKAREVGDYYGMDVWGQGTTVTVSSASTKGPSVFPLAPSSKSTSGGTAALGCLVKDYFPEPVTVSWNSGALTSGVHTFPAVLQSSGLYSLSSVVTVPSSSLGTQTYICNVNHKPSNTKVDKKVEPKSCDKTHTCPPCPAPELLGGPSVFLFPPKPKDTLMISRTPEVTCVVVDVSHEDPEVKFNWYVDGVEVHNAKTKPREEQYNSTYRVVSVLTVLHQDWLNGKEYKCKVSNKALPAPIEKTISKAKGQPREPQVYTLPPSRDELTKNQVSLTCLVKGFYPSDIAVEWESNGQPENNYKTTPPVLDSDGSFFLYSKLTVDKSRWQQGNVFSCSVMHEALHNHYTQKSLSLSPGK

SEQ ID NO: 787 - protein, 449 aa, synthetic construct
EVQLVESGGGLVQPGRSLTLSCAASGFTFDNFGMHWVRQGPGKGLEWVSGLTWNSGVIGYADSVKGRFTISRDNAKNSLYLQMNSLRPEDTALYYCAKDIRNYGPFDYWGQGTLVTVSSASTKGPSVFPLAPSSKSTSGGTAALGCLVKDYFPEPVTVSWNSGALTSGVHTFPAVLQSSGLYSLSSVVTVPSSSLGTQTYICNVNHKPSNTKVDKKVEPKSCDKTHTCPPCPAPELLGGPSVFLFPPKPKDTLMISRTPEVTCVVVDVSHEDPEVKFNWYVDGVEVHNAKTKPREEQYNSTYRVVSVLTVLHQDWLNGKEYKCKVSNKALPAPIEKTISKAKGQPREPQVYTLPPSRDELTKNQVSLTCLVKGFYPSDIAVEWESNGQPENNYKTTPPVLDSDGSFFLYSKLTVDKSRWQQGNVFSCSVMHEALHNHYTQKSLSLSPGK

SEQ ID NO: 788 - protein, 449 aa, synthetic construct
EVQLVESGGGLVQPGGSLRLSCAASGFTFNIFEMNWVRQAPGKGLEWISYISSRGTTTYYADSVRGRFTISRDNAKNSLYLQMNSLRAEDTAVYYCARDYEATIPFDFWGQGTLVTVSSASTKGPSVFPLAPSSKSTSGGTAALGCLVKDYFPEPVTVSWNSGALTSGVHTFPAVLQSSGLYSLSSVVTVPSSSLGTQTYICNVNHKPSNTKVDKKVEPKSCDKTHTCPPCPAPELLGGPSVFLFPPKPKDTLMISRTPEVTCVVVDVSHEDPEVKFNWYVDGVEVHNAKTKPREEQYNSTYRVVSVLTVLHQDWLNGKEYKCKVSNKALPAPIEKTISKAKGQPREPQVYTLPPSRDELTKNQVSLTCLVKGFYPSDIAVEWESNGQPENNYKTTPPVLDSDGSFFLYSKLTVDKSRWQQGNVFSCSVMHEALHNHYTQKSLSLSPGK

SEQ ID NO: 789 - protein, 451 aa, synthetic construct
EVQLVESGGSVVRPGGSLRLSCEASGFTFDDYGMSWVRQDPGKGLEWVSGINWNGDRTNYADSVKGRFIISRDNAKNSVYLQMNSLRAEDSALYHCARDQGLGVAATLDYWGQGTLVTVSSASTKGPSVFPLAPSSKSTSGGTAALGCLVKDYFPEPVTVSWNSGALTSGVHTFPAVLQSSGLYSLSSVVTVPSSSLGTQTYICNVNHKPSNTKVDKKVEPKSCDKTHTCPPCPAPELLGGPSVFLFPPKPKDTLMISRTPEVTCVVVDVSHEDPEVKFNWYVDGVEVHNAKTKPREEQYNSTYRVVSVLTVLHQDWLNGKEYKCKVSNKALPAPIEKTISKAKGQPREPQVYTLPPSRDELTKNQVSLTCLVKGFYPSDIAVEWESNGQPENNYKTTPPVLDSDGSFFLYSKLTVDKSRWQQGNVFSCSVMHEALHNHYTQKSLSLSPGK

SEQ ID NO: 790 - protein, 458 aa, synthetic construct
EVQLVESGGGLVQPGGSLRLSCAASGFTVSNYEMNWVRQAPGKGLEWVSYISSSTSNIYYADSVKGRFTISRDNAENSLYLQMNSLRVEDTAVYYCVRDGIVVVPVGRGYYYYGLDVWGQGTTVTVSSASTKGPSVFPLAPSSKSTSGGTAALGCLVKDYFPEPVTVSWNSGALTSGVHTFPAVLQSSGLYSLSSVVTVPSSSLGTQTYICNVNHKPSNTKVDKKVEPKSCDKTHTCPPCPAPELLGGPSVFLFPPKPKDTLMISRTPEVTCVVVDVSHEDPEVKFNWYVDGVEVHNAKTKPREEQYNSTYRVVSVLTVLHQDWLNGKEYKCKVSNKALPAPIEKTISKAKGQPREPQVYTLPPSRDELTKNQVSLTCLVKGFYPSDIAVEWESNGQPENNYKTTPPVLDSDGSFFLYSKLTVDKSRWQQGNVFSCSVMHEALHNHYTQKSLSLSPGK

SEQ ID NO: 791 - protein, 456 aa, synthetic construct
QVQLVESGGGVVQPGRSLRLSCAASGFPFSNYVMYWVRQAPGKGLEWVALIFFDGKKNYHADSVKGRFTITRDNSKNMLYLQMNSLRPEDAAVYYCAKIHCPNGVCYKGYYGMDVWGQGTTVTVSSASTKGPSVFPLAPSSKSTSGGTAALGCLVKDYFPEPVTVSWNSGALTSGVHTFPAVLQSSGLYSLSSVVTVPSSSLGTQTYICNVNHKPSNTKVDKKVEPKSCDKTHTCPPCPAPELLGGPSVFLFPPKPKDTLMISRTPEVTCVVVDVSHEDPEVKFNWYVDGVEVHNAKTKPREEQYNSTYRVVSVLTVLHQDWLNGKEYKCKVSNKALPAPIEKTISKAKGQPREPQVYTLPPSRDELTKNQVSLTCLVKGFYPSDIAVEWESNGQPENNYKTTPPVLDSDGSFFLYSKLTVDKSRWQQGNVFSCSVMHEALHNHYTQKSLSLSPGK

SEQ ID NO: 792 - protein, 455 aa, synthetic construct
EVQLVESGGGLVQPGGSLRLSCAASGFTFSNYWMNWVRQAPGKGLEWVANIKEDGGKKLYVDSVKGRFTISRDNAKNSLFLQMNSLRAEDTAVYYCAREDTTLVVDYYYYGMDVWGQGTTVTVSSASTKGPSVFPLAPSSKSTSGGTAALGCLVKDYFPEPVTVSWNSGALTSGVHTFPAVLQSSGLYSLSSVVTVPSSSLGTQTYICNVNHKPSNTKVDKKVEPKSCDKTHTCPPCPAPELLGGPSVFLFPPKPKDTLMISRTPEVTCVVVDVSHEDPEVKFNWYVDGVEVHNAKTKPREEQYNSTYRVVSVLTVLHQDWLNGKEYKCKVSNKALPAPIEKTISKAKGQPREPQVYTLPPSRDELTKNQVSLTCLVKGFYPSDIAVEWESNGQPENNYKTTPPVLDSDGSFFLYSKLTVDKSRWQQGNVFSCSVMHEALHNHYTQKSLSLSPGK

SEQ ID NO: 793 - protein, 452 aa, synthetic construct
QVQLVQSGAEVKKPGSSVKVSCKASGGTFNTYAITWVRQAPGQGLEWMGGIIPISGIAEYAQKFQGRVTITTDDSSTTAYMELNSLRSEDTAVYYCASWNYALYYFYGMDVWGRGTTVTVSSASTKGPSVFPLAPSSKSTSGGTAALGCLVKDYFPEPVTVSWNSGALTSGVHTFPAVLQSSGLYSLSSVVTVPSSSLGTQTYICNVNHKPSNTKVDKKVEPKSCDKTHTCPPCPAPELLGGPSVFLFPPKPKDTLMISRTPEVTCVVVDVSHEDPEVKFNWYVDGVEVHNAKTKPREEQYNSTYRVVSVLTVLHQDWLNGKEYKCKVSNKALPAPIEKTISKAKGQPREPQVYTLPPSRDELTKNQVSLTCLVKGFYPSDIAVEWESNGQPENNYKTTPPVLDSDGSFFLYSKLTVDKSRWQQGNVFSCSVMHEALHNHYTQKSLSLSPGK

SEQ ID NO: 794 - protein, 453 aa, synthetic construct
QVQLVESGGGLVKPGGSLRLSCAASGFTFSVYYMNWIRQAPGKGLEWVSYISSSGSTIYYADSVKGRFTISRDNAKNSLYLQMNSLRAEDTAVYYCGREGYSGTYSYYGMDVWGQGTTVTVSSASTKGPSVFPLAPSSKSTSGGTAALGCLVKDYFPEPVTVSWNSGALTSGVHTFPAVLQSSGLYSLSSVVTVPSSSLGTQTYICNVNHKPSNTKVDKKVEPKSCDKTHTCPPCPAPELLGGPSVFLFPPKPKDTLMISRTPEVTCVVVDVSHEDPEVKFNWYVDGVEVHNAKTKPREEQYNSTYRVVSVLTVLHQDWLNGKEYKCKVSNKALPAPIEKTISKAKGQPREPQVYTLPPSRDELTKNQVSLTCLVKGFYPSDIAVEWESNGQPENNYKTTPPVLDSDGSFFLYSKLTVDKSRWQQGNVFSCSVMHEALHNHYTQKSLSLSPGK

SEQ ID NO: 795 - protein, 452 aa, synthetic construct
EVQLVESGGGLVQPGRSLRLSCAVSGFTFDDYAMHWVRQAPGKGLEWVSGISWNSGTRGYADSVKGRFTISRDNAKNSLYLQMNSLRGEDTALYYCVKDITISPNYYGMDVWGQGTTVTVSSASTKGPSVFPLAPSSKSTSGGTAALGCLVKDYFPEPVTVSWNSGALTSGVHTFPAVLQSSGLYSLSSVVTVPSSSLGTQTYICNVNHKPSNTKVDKKVEPKSCDKTHTCPPCPAPELLGGPSVFLFPPKPKDTLMISRTPEVTCVVVDVSHEDPEVKFNWYVDGVEVHNAKTKPREEQYNSTYRVVSVLTVLHQDWLNGKEYKCKVSNKALPAPIEKTISKAKGQPREPQVYTLPPSRDELTKNQVSLTCLVKGFYPSDIAVEWESNGQPENNYKTTPPVLDSDGSFFLYSKLTVDKSRWQQGNVFSCSVMHEALHNHYTQKSLSLSPGK

SEQ ID NO: 796 - protein, 330 aa, synthetic construct [sequence omitted]

SEQ ID NO: 797 - DNA, 276 bp, synthetic construct
  source 1..276: mol_type = other DNA
cctctactgtgccttctagttgccagccatctgttgtttgcccctcccccttgccttccttgaccctggaaggtgccactcccactgtcctttcctaataaaatgaggaaattgcatcacattgtctgagtaggtgtcattctattctggggggtggggtggggcaggacagcaagggggaggattgggaagacaatagcaggcatgctggggatgcagtgggctctatggcttctgaggtggaaagaaccagctggggctctagggggtatcccc

SEQ ID NO: 798 - DNA, 227 bp, synthetic construct
  source 1..227: mol_type = other DNA
gacatgataagatacattgatgagtttggacaaaccacaactagaatgcagtgaaaaaaatgcttgatttgtgaaatttgtgatgctattgcttgatttgtaaccattataagctgcaataaacaagttaacaacaacaattgcattcattttatgtttcaggttcagggggaggtgtgggaggttttttaaagcaagtaaaacctctacaaatgtggtatggctga

SEQ ID NO: 799 - DNA, 49 bp, synthetic construct
  source 1..49: mol_type = other DNA
aataaaagatctttattttcattagatctgtgtgttggttttttgtgtg

SEQ ID NO: 800 - DNA, 504 bp, synthetic construct
  source 1..504: mol_type = other DNA
cctctactgtgccttctagttgccagccatctgttgtttgcccctcccccttgccttccttgaccctggaaggtgccactcccactgtcctttcctaataaaatgaggaaattgcatcacattgtctgagtaggtgtcattctattctggggggtggggtggggcaggacagcaagggggaggattgggaagacaatagcaggcatgctggggatgcagtgggctctatggcttctgaggtggaaagaaccagctggggctctagggggtatccccagacatgataagatacattgatgagtttggacaaaccacaactagaatgcagtgaaaaaaatgcttgatttgtgaaatttgtgatgctattgcttgatttgtaaccattataagctgcaataaacaagttaacaacaacaattgcattcattttatgtttcaggttcagggggaggtgtgggaggttttttaaagcaagtaaaacctctacaaatgtggtatggctga

SEQ ID NO: 801 - DNA, 600 bp, synthetic construct
  source 1..600: mol_type = other DNA
aatgtaatagtcacggacattattatcggtctgggatgtcatagtagcttaacggtagcgtgttggaacggtattcggtcacacaaccatgcgacacgtttaagttctgatacagtgcaaagggcttctcatccaattggtctacctgaagactatggtagacatctatgctgccaagttgattttggggtacagtaactgtctaaactagaagatcttttttctaaccagcggcaaaccggttcaggtaaatggtacccgatccgcttgctgctggcgtggccaccgtaaggtgttgtacttgaattggctgaatgacgaatgtgacacggcgagcatctccgattggaggggacacggtgcggcacctacggggtctgaaatttggaccacgatggactctctcgaatgcagacgctcttaatacccaaagatcacggcacgcgacgcttaacttaggttggccatgagtaacttcgcggtctggcggcgccggggttgtcatggttccgtcctgcgatactttcttcaaaagtgtcagccattcgttccacactagctcgatcccacaaccaaagatatagggagggtgattcggac

SEQ ID NO: 802 - DNA, 31 bp, synthetic construct
  source 1..31: mol_type = other DNA
ctggccttgggggagggggaggccagaatga

SEQ ID NO: 803 - DNA, 45 bp, synthetic construct
  source 1..45: mol_type = other DNA
gggggctcaggaggaggtggctcaggaggtggaggttcaggaggg

SEQ ID NO: 804 - DNA, 15 bp, synthetic construct
  source 1..15: mol_type = other DNA
gggggtggtggctct

SEQ ID NO: 805 - DNA, 54 bp, synthetic construct
  source 1..54: mol_type = other DNA
atgaagtgggtaacctttatttcccttctttttctcttttcctcggcttattcc

SEQ ID NO: 806 - DNA, 27 bp, synthetic construct
  source 1..27: mol_type = other DNA
cggggtgtgtttcgtcgagatgcactt

SEQ ID NO: 807 - DNA, 138 bp, synthetic construct
  source 1..138: mol_type = other DNA
gctgaggccgcggccaaggaagcggctgcaaaggaggctgctgcaaaagaggccgctgctaaagccctggaggcagaagcagcagccaaggaggcggcagctaaggaagccgcagccaaagaagctgccgccaaggcc

SEQ ID NO: 808 - protein, 46 aa, synthetic construct
AEAAAKEAAAKEAAAKEAAAKALEAEAAAKEAAAKEAAAKEAAAKA

SEQ ID NO: 809 - DNA, 15 bp, synthetic construct
  source 1..15: mol_type = other DNA
ggaggtggtggaagt

SEQ ID NO: 810 - DNA, 720 bp, synthetic construct
  source 1..720: mol_type = other DNA
gaagtacagctcgtcgaaagtggcggtggtcttgttcagcctggaaactccctcaccctctcatgtgtcgcaagtggatttactttctcaaattatggaatgcattggattaggcaagcaccaaaaaaaggacttgaatggatagctatgatatattacgactcctctaaaatgaattacgcagatactgtaaaaggcaggtttacaatttctcgggataactctaaaaacactctttaccttgaaatgaactctcttagatccgaagatacagctatgtactattgcgcagtgccaactagtcattacgtcgtcgatgtttggggacaaggcgtaagtgtaacagtcagctcaggcggcggcggaagcggagggggaggatcaggaggaggcggatccgacattcagatgacacaatccccagcatccctctcagcatcactcgaagaaatcgtaacaatcacctgtcaagcatctcaagatatcggcaactggctcgcatggtaccaacagaaacccggcaaatcccctcaacttcttatttatggcgcaacatccctcgcagacggcgttccctcaaggttctcaggctcacgatcaggcactcagttctcacttaaaatctccagagttcaagtcgaagatataggaatttattattgtctccaagcatataacacaccatggacattcggcggcggcaccaaactcgaacttaaa

SEQ ID NO: 811 - protein, 240 aa, synthetic construct
EVQLVESGGGLVQPGNSLTLSCVASGFTFSNYGMHWIRQAPKKGLEWIAMIYYDSSKMNYADTVKGRFTISRDNSKNTLYLEMNSLRSEDTAMYYCAVPTSHYVVDVWGQGVSVTVSSGGGGSGGGGSGGGGSDIQMTQSPASLSASLEEIVTITCQASQDIGNWLAWYQQKPGKSPQLLIYGATSLADGVPSRFSGSRSGTQFSLKISRVQVEDIGIYYCLQAYNTPWTFGGGTKLELK

SEQ ID NO: 812 - DNA, 732 bp, synthetic construct
  source 1..732: mol_type = other DNA
gaggtccaactggttgaatctggagggggcctggtgcaacctggcaggagcctgagactgagctgtgctgcctctggcttcacctttgatgactatgccatgaactgggtgagacaggcccctggcaagggcctggagtgggtgtctggcatcagctggagctctggcagcatggactatgcagattctgtgaagggcaggttcaccatcagcagagataatgccaagaacagcctgtacctgcagatgaacagcctcaggacagaggacacagccctgtactactgtgccaaggccagagaagtgggtgactactatggcatggatgtgtggggccagggcaccacagtgacagtgagctctggaggaggaggctctggaggaggaggctctggagggggaggctctgacatccagatgacccagagccccagctccctgtcagccagtgtgggtgacagagtgaccatcacctgcagagccagccagagcatcagcagctacctgaactggtaccagcagaaacctggcaaagcccccaagctgctgatttatgctgctagcagcctgcagagtggagtgcccagcagattctcaggcagtggctctggcacagacttcaccctgaccatctccagcctgcagccagaagactttgccacctactactgccagcagagctacagcacccctcctatcacctttggccagggcacaagactggagatcaag

SEQ ID NO: 813 - protein, 244 aa, synthetic construct
EVQLVESGGGLVQPGRSLRLSCAASGFTFDDYAMNWVRQAPGKGLEWVSGISWSSGSMDYADSVKGRFTISRDNAKNSLYLQMNSLRTEDTALYYCAKAREVGDYYGMDVWGQGTTVTVSSGGGGSGGGGSGGGGSDIQMTQSPSSLSASVGDRVTITCRASQSISSYLNWYQQKPGKAPKLLIYAASSLQSGVPSRFSGSGSGTDFTLTISSLQPEDFATYYCQQSYSTPPITFGQGTRLEIK

SEQ ID NO: 814 - DNA, 1443 bp, synthetic construct
  source 1..1443: mol_type = other DNA
gaggtccaactggttgaatctggagggggcctggtgcaacctggcaggagcctgagactgagctgtgctgcctctggcttcacctttgatgactatgccatgaactgggtgagacaggcccctggcaagggcctggagtgggtgtctggcatcagctggagctctggcagcatggactatgcagattctgtgaagggcaggttcaccatcagcagagataatgccaagaacagcctgtacctgcagatgaacagcctcaggacagaggacacagccctgtactactgtgccaaggccagagaagtgggtgactactatggcatggatgtgtggggccagggcaccacagtgacagtgagctctgcctccaccaagggcccatcggtcttccccctggcgccctgctccaggagcacctccgagagcacagccgccctgggctgcctggtcaaggactacttccccgaaccggtgacggtgtcgtggaactcaggcgccctgaccagcggcgtgcacaccttcccggctgtcctacagtcctcaggactctactccctcagcagcgtggtgaccgtgccctccagcagcttgggcacgaagacctacacctgcaacgtagatcacaagcccagcaacaccaaggtggacaagagagttgagtccaaatatggtcccccaggaagcggagctactaacttcagcctgctgaagcaggctggagacgtggaggagaaccctggacctatggcctttctgtggctgctgagctgttgggccctgctgggcaccaccttcggcgacatccagatgacccagagccccagctccctgtcagccagtgtgggtgacagagtgaccatcacctgcagagccagccagagcatcagcagctacctgaactggtaccagcagaaacctggcaaagcccccaagctgctgatttatgctgctagcagcctgcagagtggagtgcccagcagattctcaggcagtggctctggcacagacttcaccctgaccatctccagcctgcagccagaagactttgccacctactactgccagcagagctacagcacccctcctatcacctttggccagggcacaagactggagatcaagcgaactgtggctgcaccatctgtcttcatcttcccgccatctgatgagcagttgaaatctggaactgcctctgttgtgtgcctgctgaataacttctatcccagagaggccaaagtacagtggaaggtggataacgccctccaatcgggtaactcccaggagagtgtcacagagcaggacagcaaggacagcacctacagcctcagcagcaccctgacgctgagcaaagcagactacgagaaacacaaagtctacgcctgcgaagtcacccatcagggcctgagctcgcccgtcacaaagagcttcaacaggggagagtgt

SEQ ID NO: 815 - protein, 481 aa, synthetic construct
EVQLVESGGGLVQPGRSLRLSCAASGFTFDDYAMNWVRQAPGKGLEWVSGISWSSGSMDYADSVKGRFTISRDNAKNSLYLQMNSLRTEDTALYYCAKAREVGDYYGMDVWGQGTTVTVSSASTKGPSVFPLAPCSRSTSESTAALGCLVKDYFPEPVTVSWNSGALTSGVHTFPAVLQSSGLYSLSSVVTVPSSSLGTKTYTCNVDHKPSNTKVDKRVESKYGPPGSGATNFSLLKQAGDVEENPGPMAFLWLLSCWALLGTTFGDIQMTQSPSSLSASVGDRVTITCRASQSISSYLNWYQQKPGKAPKLLIYAASSLQSGVPSRFSGSGSGTDFTLTISSLQPEDFATYYCQQSYSTPPITFGQGTRLEIKRTVAAPSVFIFPPSDEQLKSGTASVVCLLNNFYPREAKVQWKVDNALQSGNSQESVTEQDSKDSTYSLSSTLTLSKADYEKHKVYACEVTHQGLSSPVTKSFNRGEC

SEQ ID NO: 816 - DNA, 1443 bp, synthetic construct
  source 1..1443: mol_type = other DNA
gacatccagatgacccagagccccagctccctgtcagccagtgtgggtgacagagtgaccatcacctgcagagccagccagagcatcagcagctacctgaactggtaccagcagaaacctggcaaagcccccaagctgctgatttatgctgctagcagcctgcagagtggagtgcccagcagattctcaggcagtggctctggcacagacttcaccctgaccatctccagcctgcagccagaagactttgccacctactactgccagcagagctacagcacccctcctatcacctttggccagggcacaagactggagatcaagcgaactgtggctgcaccatctgtcttcatcttcccgccatctgatgagcagttgaaatctggaactgcctctgttgtgtgcctgctgaataacttctatcccagagaggccaaagtacagtggaaggtggataacgccctccaatcgggtaactcccaggagagtgtcacagagcaggacagcaaggacagcacctacagcctcagcagcaccctgacgctgagcaaagcagactacgagaaacacaaagtctacgcctgcgaagtcacccatcagggcctgagctcgcccgtcacaaagagcttcaacaggggagagtgtggaagcggagctactaacttcagcctgctgaagcaggctggagacgtggaggagaaccctggacctatggcctttctgtggctgctgagctgttgggccctgctgggcaccaccttcggcgaggtccaactggttgaatctggagggggcctggtgcaacctggcaggagcctgagactgagctgtgctgcctctggcttcacctttgatgactatgccatgaactgggtgagacaggcccctggcaagggcctggagtgggtgtctggcatcagctggagctctggcagcatggactatgcagattctgtgaagggcaggttcaccatcagcagagataatgccaagaacagcctgtacctgcagatgaacagcctcaggacagaggacacagccctgtactactgtgccaaggccagagaagtgggtgactactatggcatggatgtgtggggccagggcaccacagtgacagtgagctctgcctccaccaagggcccatcggtcttccccctggcgccctgctccaggagcacctccgagagcacagccgccctgggctgcctggtcaaggactacttccccgaaccggtgacggtgtcgtggaactcaggcgccctgaccagcggcgtgcacaccttcccggctgtcctacagtcctcaggactctactccctcagcagcgtggtgaccgtgccctccagcagcttgggcacgaagacctacacctgcaacgtagatcacaagcccagcaacaccaaggtggacaagagagttgagtccaaatatggtccccca

SEQ ID NO: 817 - protein, 481 aa, synthetic construct
DIQMTQSPSSLSASVGDRVTITCRASQSISSYLNWYQQKPGKAPKLLIYAASSLQSGVPSRFSGSGSGTDFTLTISSLQPEDFATYYCQQSYSTPPITFGQGTRLEIKRTVAAPSVFIFPPSDEQLKSGTASVVCLLNNFYPREAKVQWKVDNALQSGNSQESVTEQDSKDSTYSLSSTLTLSKADYEKHKVYACEVTHQGLSSPVTKSFNRGECGSGATNFSLLKQAGDVEENPGPMAFLWLLSCWALLGTTFGEVQLVESGGGLVQPGRSLRLSCAASGFTFDDYAMNWVRQAPGKGLEWVSGISWSSGSMDYADSVKGRFTISRDNAKNSLYLQMNSLRTEDTALYYCAKAREVGDYYGMDVWGQGTTVTVSSASTKGPSVFPLAPCSRSTSESTAALGCLVKDYFPEPVTVSWNSGALTSGVHTFPAVLQSSGLYSLSSVVTVPSSSLGTKTYTCNVDHKPSNTKVDKRVESKYGPP

SEQ ID NO: 818 - DNA, 1791 bp, synthetic construct
  source 1..1791: mol_type = other DNA
atgaagtgggtaacctttatttcccttctttttctcttttcctcggcttattcccggggtgtgtttcgtcgagatgcacttcaccctctttctccccaaggccatcctgccaggttacatcgcatagtgccccggctccgagatgtctttgggtgggggaacctcacctgcccaatctgcaaaggtctattcaccgccatcaacctcgggctgaagaaggaacccaatgtggctcgcgtgggctccgtggccatcaagctgtgcaatctgctgaagatagcaccacctgccgtgtgccaatccattgtccacctctttgaggatgacatggtggaggtgtggagacgctcagtgctgagcccatctgaggcctgtggcctgctcctgggctccacctgtgggcactgggacattttctcatcttggaacatctctttgcctactgtgccgaagccgccccccaaaccccctagccccccagccccaggtgcccctgtcagccgcatcctcttcctcactgacctgcactgggatcatgactacctggagggcacggaccctgactgtgcagacccactgtgctgccgccggggttctggcctgccgcccgcatcccggccaggtgccggatactggggcgaatacagcaagtgtgacctgcccctgaggaccctggagagcctgttgagtgggctgggcccagccggcccttttgatatggtgtactggacaggagacatccccgcacatgatgtctggcaccagactcgtcaggaccaactgcgggccctgaccaccgtcacagcacttgtgaggaagttcctggggccagtgccagtgtaccctgctgtgggtaaccatgaaagcacacctgtcaatagcttccctccccccttcattgagggcaaccactcctcccgctggctctatgaagcgatggccaaggcttgggagccctggctgcctgccgaagccctgcgcaccctcagaattggggggttctatgctctttccccataccccggtctccgcctcatctctctcaatatgaatttttgttcccgtgagaacttctggctcttgatcaactccacggatcccgcaggacagctccagtggctggtgggggagcttcaggctgctgaggatcgaggagacaaagtgcatataattggccacattcccccagggcactgtctgaagagctggagctggaattattaccgaattgtagccaggtatgagaacaccctggctgctcagttctttggccacactcatgtggatgaatttgaggtcttctatgatgaagagactctgagccggccgctggctgtagccttcctggcacccagtgcaactacctacatcggccttaatcctggttaccgtgtgtaccaaatagatggaaactactccgggagctctcacgtggtcctggaccatgagacctacatcctgaatctgacccaggcaaacataccgggagccataccgcactggcagcttctctacagggctcgagaaacctatgggctgcccaacacactgcctaccgcctggcacaacctggtatatcgcatgcggggcgacatgcaacttttccagaccttctggtttctctaccataagggccacccaccctcggagccctgtggcacgccctgccgtctggctactctttgtgcccagctctctgcccgtgctgacagccctgctctgtgccgccacctgatgccagatgggagcctcccagaggcccagagcctgtggccaaggccactgttttgc

SEQ ID NO: 819 - DNA, 1797 bp, synthetic construct
  source 1..1797: mol_type = other DNA
atgcacagacctagacgtcgtggaactcgtccacctccactggcactgctcgctgctctcctcctggctgcacgtggtgctgatgcacaccctctttctccccaaggccatcctgccaggttacatcgcatagtgccccggctccgagatgtctttgggtgggggaacctcacctgcccaatctgcaaaggtctattcaccgccatcaacctcgggctgaagaaggaacccaatgtggctcgcgtgggctccgtggccatcaagctgtgcaatctgctgaagatagcaccacctgccgtgtgccaatccattgtccacctctttgaggatgacatggtggaggtgtggagacgctcagtgctgagcccatctgaggcctgtggcctgctcctgggctccacctgtgggcactgggacattttctcatcttggaacatctctttgcctactgtgccgaagccgccccccaaaccccctagccccccagccccaggtgcccctgtcagccgcatcctcttcctcactgacctgcactgggatcatgactacctggagggcacggaccctgactgtgcagacccactgtgctgccgccggggttctggcctgccgcccgcatcccggccaggtgccggatactggggcgaatacagcaagtgtgacctgcccctgaggaccctggagagcctgttgagtgggctgggcccagccggcccttttgatatggtgtactggacaggagacatccccgcacatgatgtctggcaccagactcgtcaggaccaactgcgggccctgaccaccgtcacagcacttgtgaggaagttcctggggccagtgccagtgtaccctgctgtgggtaaccatgaaagcacacctgtcaatagcttccctccccccttcattgagggcaaccactcctcccgctggctctatgaagcgatggccaaggcttgggagccctggctgcctgccgaagccctgcgcaccctcagaattggggggttctatgctctttccccataccccggtctccgcctcatctctctcaatatgaatttttgttcccgtgagaacttctggctcttgatcaactccacggatcccgcaggacagctccagtggctggtgggggagcttcaggctgctgaggatcgaggagacaaagtgcatataattggccacattcccccagggcactgtctgaagagctggagctggaattattaccgaattgtagccaggtatgagaacaccctggctgctcagttctttggccacactcatgtggatgaatttgaggtcttctatgatgaagagactctgagccggccgctggctgtagccttcctggcacccagtgcaactacctacatcggccttaatcctggttaccgtgtgtaccaaatagatggaaactactccgggagctctcacgtggtcctggaccatgagacctacatcctgaatctgacccaggcaaacataccgggagccataccgcactggcagcttctctacagggctcgagaaacctatgggctgcccaacacactgcctaccgcctggcacaacctggtatatcgcatgcggggcgacatgcaacttttccagaccttctggtttctctaccataagggccacccaccctcggagccctgtggcacgccctgccgtctggctactctttgtgcccagctctctgcccgtgctgacagccctgctctgtgccgccacctgatgccagatgggagcctcccagaggcccagagcctgtggccaaggccactgttttgc

SEQ ID NO: 820 - DNA, 3264 bp, synthetic construct
  source 1..3264: mol_type = other DNA
atgaagtgggtaacctttatttcccttctttttctcttttcctcggcttattcccggggtgtgtttcgtcgagatgcacttgaggtccaactggttgaatctggagggggcctggtgcaacctggcaggagcctgagactgagctgtgctgcctctggcttcacctttgatgactatgccatgaactgggtgagacaggcccctggcaagggcctggagtgggtgtctggcatcagctggagctctggcagcatggactatgcagattctgtgaagggcaggttcaccatcagcagagataatgccaagaacagcctgtacctgcagatgaacagcctcaggacagaggacacagccctgtactactgtgccaaggccagagaagtgggtgactactatggcatggatgtgtggggccagggcaccacagtgacagtgagctctgcctccaccaagggcccatcggtcttccccctggcgccctgctccaggagcacctccgagagcacagccgccctgggctgcctggtcaaggactacttccccgaaccggtgacggtgtcgtggaactcaggcgccctgaccagcggcgtgcacaccttcccggctgtcctacagtcctcaggactctactccctcagcagcgtggtgaccgtgccctccagcagcttgggcacgaagacctacacctgcaacgtagatcacaagcccagcaacaccaaggtggacaagagagttgagtccaaatatggtcccccaggaagcggagctactaacttcagcctgctgaagcaggctggagacgtggaggagaaccctggacctatggcctttctgtggctgctgagctgttgggccctgctgggcaccaccttcggcgacatccagatgacccagagccccagctccctgtcagccagtgtgggtgacagagtgaccatcacctgcagagccagccagagcatcagcagctacctgaactggtaccagcagaaacctggcaaagcccccaagctgctgatttatgctgctagcagcctgcagagtggagtgcccagcagattctcaggcagtggctctggcacagacttcaccctgaccatctccagcctgcagccagaagactttgccacctactactgccagcagagctacagcacccctcctatcacctttggccagggcacaagactggagatcaagcgaactgtggctgcaccatctgtcttcatcttcccgccatctgatgagcagttgaaatctggaactgcctctgttgtgtgcctgctgaataacttctatcccagagaggccaaagtacagtggaaggtggataacgccctccaatcgggtaactcccaggagagtgtcacagagcaggacagcaaggacagcacctacagcctcagcagcaccctgacgctgagcaaagcagactacgagaaacacaaagtctacgcctgcgaagtcacccatcagggcctgagctcgcccgtcacaaagagcttcaacaggggagagtgtgggggaggaggctcaggtgggggtggcagtcaccctctttctccccaaggccatcctgccaggttacatcgcatagtgccccggctccgagatgtctttgggtgggggaacctcacctgcccaatctgcaaaggtctattcaccgccatcaacctcgggctgaagaaggaacccaatgtggctcgcgtgggctccgtggccatcaagctgtgcaatctgctgaagatagcaccacctgccgtgtgccaatccattgtccacctctttgaggatgacatggtggaggtgtggagacgctcagtgctgagcccatctgaggcctgtggcctgctcctgggctccacctgtgggcactgggacattttctcatcttggaacatctctttgcctactgtgccgaagccgccccccaaaccccctagccccccagccccaggtgcccctgtcagccgcatcctcttcctcactgacctgcactgggatcatgactacctggagggcacggaccctgactgtgcagacccactgtgctgccgccggggttctggcctgccgcccgcatcccggccaggtgccggatactggggcgaatacagcaagtgtgacctgcccctgaggaccctggagagcctgttgagtgggctgggcccagccggcccttttgatatggtgtactggacaggagacatccccgcacatgatgtctggcaccagactcgtcaggaccaactgcgggccctgaccaccgtcacagcacttgtgaggaagttcctggggccagtgccagtgtaccctgctgtgggtaaccatgaaagcacacctgtcaatagcttccctccccccttcattgagggcaaccactcctcccgctggctctatgaagcgatggccaaggcttgggagccctggctgcctgccgaagccctgcgcaccctcagaattggggggttctatgctctttccccataccccggtctccgcctcatctctctcaatatgaatttttgttcccgtgagaacttctggctcttgatcaactccacggatcccgcaggacagctccagtggctggtgggggagcttcaggctgctgaggatcgaggagacaaagtgcatataattggccacattcccccagggcactgtctgaagagctggagctggaattattaccgaattgtagccaggtatgagaacaccctggctgctcagttctttggccacactcatgtggatgaatttgaggtcttctatgatgaagagactctgagccggccgctggctgtagccttcctggcacccagtgcaactacctacatcggccttaatcctggttaccgtgtgtaccaaatagatggaaactactccgggagctctcacgtggtcctggaccatgagacctacatcctgaatctgacccaggcaaacataccgggagccataccgcactggcagcttctctacagggctcgagaaacctatgggctgcccaacacactgcctaccgcctggcacaacctggtatatcgcatgcggggcgacatgcaacttttccagaccttctggtttctctaccataagggccacccaccctcggagccctgtggcacgccctgccgtctggctactctttgtgcccagctctctgcccgtgctgacagccctgctctgtgccgccacctgatgccagatgggagcctcccagaggcccagagcctgtggccaaggccactgttttgc

SEQ ID NO: 821 - DNA, 3264 bp, synthetic construct
  source 1..3264: mol_type = other DNA
atgaagtgggtaacctttatttcccttctttttctcttttcctcggcttattcccggggtgtgtttcgtcgagatgcacttgacatccagatgacccagagccccagctccctgtcagccagtgtgggtgacagagtgaccatcacctgcagagccagccagagcatcagcagctacctgaactggtaccagcagaaacctggcaaagcccccaagctgctgatttatgctgctagcagcctgcagagtggagtgcccagcagattctcaggcagtggctctggcacagacttcaccctgaccatctccagcctgcagccagaagactttgccacctactactgccagcagagctacagcacccctcctatcacctttggccagggcacaagactggagatcaagcgaactgtggctgcaccatctgtcttcatcttcccgccatctgatgagcagttgaaatctggaactgcctctgttgtgtgcctgctgaataacttctatcccagagaggccaaagtacagtggaaggtggataacgccctccaatcgggtaactcccaggagagtgtcacagagcaggacagcaaggacagcacctacagcctcagcagcaccctgacgctgagcaaagcagactacgagaaacacaaagtctacgcctgcgaagtcacccatcagggcctgagctcgcccgtcacaaagagcttcaacaggggagagtgtggaagcggagctactaacttcagcctgctgaagcaggctggagacgtggaggagaaccctggacctatggcctttctgtggctgctgagctgttgggccctgctgggcaccaccttcggcgaggtccaactggttgaatctggagggggcctggtgcaacctggcaggagcctgagactgagctgtgctgcctctggcttcacctttgatgactatgccatgaactgggtgagacaggcccctggcaagggcctggagtgggtgtctggcatcagctggagctctggcagcatggactatgcagattctgtgaagggcaggttcaccatcagcagagataatgccaagaacagcctgtacctgcagatgaacagcctcaggacagaggacacagccctgtactactgtgccaaggccagagaagtgggtgactactatggcatggatgtgtggggccagggcaccacagtgacagtgagctctgcctccaccaagggcccatcggtcttccccctggcgccctgctccaggagcacctccgagagcacagccgccctgggctgcctggtcaaggactacttccccgaaccggtgacggtgtcgtggaactcaggcgccctgaccagcggcgtgcacaccttcccggctgtcctacagtcctcaggactctactccctcagcagcgtggtgaccgtgccctccagcagcttgggcacgaagacctacacctgcaacgtagatcacaagcccagcaacaccaaggtggacaagagagttgagtccaaatatggtcccccagggggaggaggctcaggtgggggtggcagtcaccctctttctccccaaggccatcctgccaggttacatcgcatagtgccccggctccgagatgtctttgggtgggggaacctcacctgcccaatctgcaaaggtctattcaccgccatcaacctcgggctgaagaaggaacccaatgtggctcgcgtgggctccgtggccatcaagctgtgcaatctgctgaagatagcaccacctgccgtgtgccaatccattgtccacctctttgaggatgacatggtggaggtgtggagacgctcagtgctgagcccatctgaggcctgtggcctgctcctgggctccacctgtgggcactgggacattttctcatcttggaacatctctttgcctactgtgccgaagccgccccccaaaccccctagccccccagccccaggtgcccctgtcagccgcatcctcttcctcactgacctgcactgggatcatgactacctggagggcacggaccctgactgtgcagacccactgtgctgccgccggggttctggcctgccgcccgcatcccggccaggtgccggatactggggcgaatacagcaagtgtgacctgcccctgaggaccctggagagcctgttgagtgggctgggcccagccggcccttttgatatggtgtactggacaggagacatccccgcacatgatgtctggcaccagactcgtcaggaccaactgcgggccctgaccaccgtcacagcacttgtgaggaagttcctggggccagtgccagtgtaccctgctgtgggtaaccatgaaagcacacctgtcaatagcttccctccccccttcattgagggcaaccactcctcccgctggctctatgaagcgatggccaaggcttgggagccctggctgcctgccgaagccctgcgcaccctcagaattggggggttctatgctctttccccataccccggtctccgcctcatctctctcaatatgaatttttgttcccgtgagaacttctggctcttgatcaactccacggatcccgcaggacagctccagtggctggtgggggagcttcaggctgctgaggatcgaggagacaaagtgcatataattggccacattcccccagggcactgtctgaagagctggagctggaattattaccgaattgtagccaggtatgagaacaccctggctgctcagttctttggccacactcatgtggatgaatttgaggtcttctatgatgaagagactctgagccggccgctggctgtagccttcctggcacccagtgcaactacctacatcggccttaatcctggttaccgtgtgtaccaaatagatggaaactactccgggagctctcacgtggtcctggaccatgagacctacatcctgaatctgacccaggcaaacataccgggagccataccgcactggcagcttctctacagggctcgagaaacctatgggctgcccaacacactgcctaccgcctggcacaacctggtatatcgcatgcggggcgacatgcaacttttccagaccttctggtttctctaccataagggccacccaccctcggagccctgtggcacgccctgccgtctggctactctttgtgcccagctctctgcccgtgctgacagccctgctctgtgccgccacctgatgccagatgggagcctcccagaggcccagagcctgtggccaaggccactgttttgc

SEQ ID NO: 822 - DNA, 2553 bp, synthetic construct
  source 1..2553: mol_type = other DNA
atgaagtgggtaacctttatttcccttctttttctcttttcctcggcttattcccggggtgtgtttcgtcgagatgcacttgacatccagatgacccagagccccagctccctgtcagccagtgtgggtgacagagtgaccatcacctgcagagccagccagagcatcagcagctacctgaactggtaccagcagaaacctggcaaagcccccaagctgctgatttatgctgctagcagcctgcagagtggagtgcccagcagattctcaggcagtggctctggcacagacttcaccctgaccatctccagcctgcagccagaagactttgccacctactactgccagcagagctacagcacccctcctatcacctttggccagggcacaagactggagatcaagggaggaggaggctctggaggaggaggctctggagggggaggctctgaggtccaactggttgaatctggagggggcctggtgcaacctggcaggagcctgagactgagctgtgctgcctctggcttcacctttgatgactatgccatgaactgggtgagacaggcccctggcaagggcctggagtgggtgtctggcatcagctggagctctggcagcatggactatgcagattctgtgaagggcaggttcaccatcagcagagataatgccaagaacagcctgtacctgcagatgaacagcctcaggacagaggacacagccctgtactactgtgccaaggccagagaagtgggtgactactatggcatggatgtgtggggccagggcaccacagtgacagtgagctctgggggaggaggctcaggtgggggtggcagtcaccctctttctccccaaggccatcctgccaggttacatcgcatagtgccccggctccgagatgtctttgggtgggggaacctcacctgcccaatctgcaaaggtctattcaccgccatcaacctcgggctgaagaaggaacccaatgtggctcgcgtgggctccgtggccatcaagctgtgcaatctgctgaagatagcaccacctgccgtgtgccaatccattgtccacctctttgaggatgacatggtggaggtgtggagacgctcagtgctgagcccatctgaggcctgtggcctgctcctgggctccacctgtgggcactgggacattttctcatcttggaacatctctttgcctactgtgccgaagccgccccccaaaccccctagccccccagccccaggtgcccctgtcagccgcatcctcttcctcactgacctgcactgggatcatgactacctggagggcacggaccctgactgtgcagacccactgtgctgccgccggggttctggcctgccgcccgcatcccggccaggtgccggatactggggcgaatacagcaagtgtgacctgcccctgaggaccctggagagcctgttgagtgggctgggcccagccggcccttttgatatggtgtactggacaggagacatccccgcacatgatgtctggcaccagactcgtcaggaccaactgcgggccctgaccaccgtcacagcacttgtgaggaagttcctggggccagtgccagtgtaccctgctgtgggtaaccatgaaagcacacctgtcaatagcttccctccccccttcattgagggcaaccactcctcccgctggctctatgaagcgatggccaaggcttgggagccctggctgcctgccgaagccctgcgcaccctcagaattggggggttctatgctctttccccataccccggtctccgcctcatctctctcaatatgaatttttgttcccgtgagaacttctggctcttgatcaactccacggatcccgcaggacagctccagtggctggtgggggagcttcaggctgctgaggatcgaggagacaaagtgcatataattggccacattcccccagggcactgtctgaagagctggagctggaattattaccgaattgtagccaggtatgagaacaccctggctgctcagttctttggccacactcatgtggatgaatttgaggtcttctatgatgaagagactctgagccggccgctggctgtagccttcctggcacccagtgcaactacctacatcggccttaatcctggttaccgtgtgtaccaaatagatggaaactactccgggagctctcacgtggtcctggaccatgagacctacatcctgaatctgacccaggcaaacataccgggagccataccgcactggcagcttctctacagggctcgagaaacctatgggctgcccaacacactgcctaccgcctggcacaacctggtatatcgcatgcggggcgacatgcaacttttccagaccttctggtttctctaccataagggccacccaccctcggagccctgtggcacgccctgccgtctggctactctttgtgcccagctctctgcccgtgctgacagccctgctctgtgccgccacctgatgccagatgggagcctcccagaggcccagagcctgtggccaaggccactgttttgc

SEQ ID NO: 823 - DNA, 2661 bp, synthetic construct
  source 1..2661: mol_type = other DNA
atgaagtgggtaacctttatttcccttctttttctcttttcctcggcttattcccggggtgtgtttcgtcgagatgcacttgacatccagatgacccagagccccagctccctgtcagccagtgtgggtgacagagtgaccatcacctgcagagccagccagagcatcagcagctacctgaactggtaccagcagaaacctggcaaagcccccaagctgctgatttatgctgctagcagcctgcagagtggagtgcccagcagattctcaggcagtggctctggcacagacttcaccctgaccatctccagcctgcagccagaagactttgccacctactactgccagcagagctacagcacccctcctatcacctttggccagggcacaagactggagatcaagggaggaggaggctctggaggaggaggctctggagggggaggctctgaggtccaactggttgaatctggagggggcctggtgcaacctggcaggagcctgagactgagctgtgctgcctctggcttcacctttgatgactatgccatgaactgggtgagacaggcccctggcaagggcctggagtgggtgtctggcatcagctggagctctggcagcatggactatgcagattctgtgaagggcaggttcaccatcagcagagataatgccaagaacagcctgtacctgcagatgaacagcctcaggacagaggacacagccctgtactactgtgccaaggccagagaagtgggtgactactatggcatggatgtgtggggccagggcaccacagtgacagtgagctctgctgaggccgcggccaaggaagcggctgcaaaggaggctgctgcaaaagaggccgctgctaaagccctggaggcagaagcagcagccaaggaggcggcagctaaggaagccgcagccaaagaagctgccgccaaggcccaccctctttctccccaaggccatcctgccaggttacatcgcatagtgccccggctccgagatgtctttgggtgggggaacctcacctgcccaatctgcaaaggtctattcaccgccatcaacctcgggctgaagaaggaacccaatgtggctcgcgtgggctccgtggccatcaagctgtgcaatctgctgaagatagcaccacctgccgtgtgccaatccattgtccacctctttgaggatgacatggtggaggtgtggagacgctcagtgctgagcccatctgaggcctgtggcctgctcctgggctccacctgtgggcactgggacattttctcatcttggaacatctctttgcctactgtgccgaagccgccccccaaaccccctagccccccagccccaggtgcccctgtcagccgcatcctcttcctcactgacctgcactgggatcatgactacctggagggcacggaccctgactgtgcagacccactgtgctgccgccggggttctggcctgccgcccgcatcccggccaggtgccggatactggggcgaatacagcaagtgtgacctgcccctgaggaccctggagagcctgttgagtgggctgggcccagccggcccttttgatatggtgtactggacaggagacatccccgcacatgatgtctggcaccagactcgtcaggaccaactgcgggccctgaccaccgtcacagcacttgtgaggaagttcctggggccagtgccagtgtaccctgctgtgggtaaccatgaaagcacacctgtcaatagcttccctccccccttcattgagggcaaccactcctcccgctggctctatgaagcgatggccaaggcttgggagccctggctgcctgccgaagccctgcgcaccctcagaattggggggttctatgctctttccccataccccggtctccgcctcatctctctcaatatgaatttttgttcccgtgagaacttctggctcttgatcaactccacggatcccgcaggacagctccagtggctggtgggggagcttcaggctgctgaggatcgaggagacaaagtgcatataattggccacattcccccagggcactgtctgaagagctggagctggaattattaccgaattgtagccaggtatgagaacaccctggctgctcagttctttggccacactcatgtggatgaatttgaggtcttctatgatgaagagactctgagccggccgctggctgtagccttcctggcacccagtgcaactacctacatcggccttaatcctggttaccgtgtgtaccaaatagatggaaactactccgggagctctcacgtggtcctggaccatgagacctacatcctgaatctgacccaggcaaacataccgggagccataccgcactggcagcttctctacagggctcgagaaacctatgggctgcccaacacactgcctaccgcctggcacaacctggtatatcgcatgcggggcgacatgcaacttttccagaccttctggtttctctaccataagggccacccaccctcggagccctgtggcacgccctgccgtctggctactctttgtgcccagctctctgcccgtgctgacagccctgctctgtgccgccacctgatgccagatgggagcctcccagaggcccagagcctgtggccaaggccactgttttgc

SEQ ID NO: 824 - DNA, 2568 bp, synthetic construct
  source 1..2568: mol_type = other DNA
atgaagtgggtaacctttatttcccttctttttctcttttcctcggcttattcccggggtgtgtttcgtcgagatgcacttgacatccagatgacccagagccccagctccctgtcagccagtgtgggtgacagagtgaccatcacctgcagagccagccagagcatcagcagctacctgaactggtaccagcagaaacctggcaaagcccccaagctgctgatttatgctgctagcagcctgcagagtggagtgcccagcagattctcaggcagtggctctggcacagacttcaccctgaccatctccagcctgcagccagaagactttgccacctactactgccagcagagctacagcacccctcctatcacctttggccagggcacaagactggagatcaagggaggaggaggctctggaggaggaggctctggagggggaggctctgaggtccaactggttgaatctggagggggcctggtgcaacctggcaggagcctgagactgagctgtgctgcctctggcttcacctttgatgactatgccatgaactgggtgagacaggcccctggcaagggcctggagtgggtgtctggcatcagctggagctctggcagcatggactatgcagattctgtgaagggcaggttcaccatcagcagagataatgccaagaacagcctgtacctgcagatgaacagcctcaggacagaggacacagccctgtactactgtgccaaggccagagaagtgggtgactactatggcatggatgtgtggggccagggcaccacagtgacagtgagctctggaggaggaggctctggaggaggaggctctggagggggaggctctcaccctctttctccccaaggccatcctgccaggttacatcgcatagtgccccggctccgagatgtctttgggtgggggaacctcacctgcccaatctgcaaaggtctattcaccgccatcaacctcgggctgaagaaggaacccaatgtggctcgcgtgggctccgtggccatcaagctgtgcaatctgctgaagatagcaccacctgccgtgtgccaatccattgtccacctctttgaggatgacatggtggaggtgtggagacgctcagtgctgagcccatctgaggcctgtggcctgctcctgggctccacctgtgggcactgggacattttctcatcttggaacatctctttgcctactgtgccgaagccgccccccaaaccccctagccccccagccccaggtgcccctgtcagccgcatcctcttcctcactgacctgcactgggatcatgactacctggagggcacggaccctgactgtgcagacccactgtgctgccgccggggttctggcctgccgcccgcatcccggccaggtgccggatactggggcgaatacagcaagtgtgacctgcccctgaggaccctggagagcctgttgagtgggctgggcccagccggcccttttgatatggtgtactggacaggagacatccccgcacatgatgtctggcaccagactcgtcaggaccaactgcgggccctgaccaccgtcacagcacttgtgaggaagttcctggggccagtgccagtgtaccctgctgtgggtaaccatgaaagcacacctgtcaatagcttccctccccccttcattgagggcaaccactcctcccgctggctctatgaagcgatggccaaggcttgggagccctggctgcctgccgaagccctgcgcaccctcagaattggggggttctatgctctttccccataccccggtctccgcctcatctctctcaatatgaatttttgttcccgtgagaacttctggctcttgatcaactccacggatcccgcaggacagctccagtggctggtgggggagcttcaggctgctgaggatcgaggagacaaagtgcatataattggccacattcccccagggcactgtctgaagagctggagctggaattattaccgaattgtagccaggtatgagaacaccctggctgctcagttctttggccacactcatgtggatgaatttgaggtcttctatgatgaagagactctgagccggccgctggctgtagccttcctggcacccagtgcaactacctacatcggccttaatcctggttaccgtgtgtaccaaatagatggaaactactccgggagctctcacgtggtcctggaccatgagacctacatcctgaatctgacccaggcaaacataccgggagccataccgcactggcagcttctctacagggctcgagaaacctatgggctgcccaacacactgcctaccgcctggcacaacctggtatatcgcatgcggggcgacatgcaacttttccagaccttctggtttctctaccataagggccacccaccctcggagccctgtggcacgccctgccgtctggctactctttgtgcccagctctctgcccgtgctgacagccctgctctgtgccgccacctgatgccagatgggagcctcccagaggcccagagcctgtggccaaggccactgttttgc

SEQ ID NO: 825 - DNA, 3264 bp, synthetic construct
  source 1..3264: mol_type = other DNA
atgaagtgggtaacctttatttcccttctttttctcttttcctcggcttattcccggggtgtgtttcgtcgagatgcacttcaccctctttctccccaaggccatcctgccaggttacatcgcatagtgccccggctccgagatgtctttgggtgggggaacctcacctgcccaatctgcaaaggtctattcaccgccatcaacctcgggctgaagaaggaacccaatgtggctcgcgtgggctccgtggccatcaagctgtgcaatctgctgaagatagcaccacctgccgtgtgccaatccattgtccacctctttgaggatgacatggtggaggtgtggagacgctcagtgctgagcccatctgaggcctgtggcctgctcctgggctccacctgtgggcactgggacattttctcatcttggaacatctctttgcctactgtgccgaagccgccccccaaaccccctagccccccagccccaggtgcccctgtcagccgcatcctcttcctcactgacctgcactgggatcatgactacctggagggcacggaccctgactgtgcagacccactgtgctgccgccggggttctggcctgccgcccgcatcccggccaggtgccggatactggggcgaatacagcaagtgtgacctgcccctgaggaccctggagagcctgttgagtgggctgggcccagccggcccttttgatatggtgtactggacaggagacatccccgcacatgatgtctggcaccagactcgtcaggaccaactgcgggccctgaccaccgtcacagcacttgtgaggaagttcctggggccagtgccagtgtaccctgctgtgggtaaccatgaaagcacacctgtcaatagcttccctccccccttcattgagggcaaccactcctcccgctggctctatgaagcgatggccaaggcttgggagccctggctgcctgccgaagccctgcgcaccctcagaattggggggttctatgctctttccccataccccggtctccgcctcatctctctcaatatgaatttttgttcccgtgagaacttctggctcttgatcaactccacggatcccgcaggacagctccagtggctggtgggggagcttcaggctgctgaggatcgaggagacaaagtgcatataattggccacattcccccagggcactgtctgaagagctggagctggaattattaccgaattgtagccaggtatgagaacaccctggctgctcagttctttggccacactcatgtggatgaatttgaggtcttctatgatgaagagactctgagccggccgctggctgtagccttcctggcacccagtgcaactacctacatcggccttaatcctggttaccgtgtgtaccaaatagatggaaactactccgggagctctcacgtggtcctggaccatgagacctacatcctgaatctgacccaggcaaacataccgggagccataccgcactggcagcttctctacagggctcgagaaacctatgggctgcccaacacactgcctaccgcctggcacaacctggtatatcgcatgcggggcgacatgcaacttttccagaccttctggtttctctaccataagggccacccaccctcggagccctgtggcacgccctgccgtctggctactctttgtgcccagctctctgcccgtgctgacagccctgctctgtgccgccacctgatgccagatgggagcctcccagaggcccagagcctgtggccaaggccactgttttgcgggggaggaggctcaggtgggggtggcagtgaggtccaactggttgaatctggagggggcctggtgcaacctggcaggagcctgagactgagctgtgctgcctctggcttcacctttgatgactatgccatgaactgggtgagacaggcccctggcaagggcctggagtgggtgtctggcatcagctggagctctggcagcatggactatgcagattctgtgaagggcaggttcaccatcagcagagataatgccaagaacagcctgtacctgcagatgaacagcctcaggacagaggacacagccctgtactactgtgccaaggccagagaagtgggtgactactatggcatggatgtgtggggccagggcaccacagtgacagtgagctctgcctccaccaagggcccatcggtcttccccctggcgccctgctccaggagcacctccgagagcacagccgccctgggctgcctggtcaaggactacttccccgaaccggtgacggtgtcgtggaactcaggcgccctgaccagcggcgtgcacaccttcccggctgtcctacagtcctcaggactctactccctcagcagcgtggtgaccgtgccctccagcagcttgggcacgaagacctacacctgcaacgtagatcacaagcccagcaacaccaaggtggacaagagagttgagtccaaatatggtcccccaggaagcggagctactaacttcagcctgctgaagcaggctggagacgtggaggagaaccctggacctatggcctttctgtggctgctgagctgttgggccctgctgggcaccaccttcggcgacatccagatgacccagagccccagctccctgtcagccagtgtgggtgacagagtgaccatcacctgcagagccagccagagcatcagcagctacctgaactggtaccagcagaaacctggcaaagcccccaagctgctgatttatgctgctagcagcctgcagagtggagtgcccagcagattctcaggcagtggctctggcacagacttcaccctgaccatctccagcctgcagccagaagactttgccacctactactgccagcagagctacagcacccctcctatcacctttggccagggcacaagactggagatcaagcgaactgtggctgcaccatctgtcttcatcttcccgccatctgatgagcagttgaaatctggaactgcctctgttgtgtgcctgctgaataacttctatcccagagaggccaaagtacagtggaaggtggataacgccctccaatcgggtaactcccaggagagtgtcacagagcaggacagcaaggacagcacctacagcctcagcagcaccctgacgctgagcaaagcagactacgagaaacacaaagtctacgcctgcgaagtcacccatcagggcctgagctcgcccgtcacaaagagcttcaacaggggagagtgt

SEQ ID NO: 826 - DNA, 3264 bp, synthetic construct
  source 1..3264: mol_type = other DNA
atgaagtgggtaacctttatttcccttctttttctcttttcctcggcttattcccggggtgtgtttcgtcgagatgcacttcaccctctttctccccaaggccatcctgccaggttacatcgcatagtgccccggctccgagatgtctttgggtgggggaacctcacctgcccaatctgcaaaggtctattcaccgccatcaacctcgggctgaagaaggaacccaatgtggctcgcgtgggctccgtggccatcaagctgtgcaatctgctgaagatagcaccacctgccgtgtgccaatccattgtccacctctttgaggatgacatggtggaggtgtggagacgctcagtgctgagcccatctgaggcctgtggcctgctcctgggctccacctgtgggcactgggacattttctcatcttggaacatctctttgcctactgtgccgaagccgccccccaaaccccctagccccccagccccaggtgcccctgtcagccgcatcctcttcctcactgacctgcactgggatcatgactacctggagggcacggaccctgactgtgcagacccactgtgctgccgccggggttctggcctgccgcccgcatcccggccaggtgccggatactggggcgaatacagcaagtgtgacctgcccctgaggaccctggagagcctgttgagtgggctgggcccagccggcccttttgatatggtgtactggacaggagacatccccgcacatgatgtctggcaccagactcgtcaggaccaactgcgggccctgaccaccgtcacagcacttgtgaggaagttcctggggccagtgccagtgtaccctgctgtgggtaaccatgaaagcacacctgtcaatagcttccctccccccttcattgagggcaaccactcctcccgctggctctatgaagcgatggccaaggcttgggagccctggctgcctgccgaagccctgcgcaccctcagaattggggggttctatgctctttccccataccccggtctccgcctcatctctctcaatatgaatttttgttcccgtgagaacttctggctcttgatcaactccacggatcccgcaggacagctccagtggctggtgggggagcttcaggctgctgaggatcgaggagacaaagtgcatataattggccacattcccccagggcactgtctgaagagctggagctggaattattaccgaattgtagccaggtatgagaacaccctggctgctcagttctttggccacactcatgtggatgaatttgaggtcttctatgatgaagagactctgagccggccgctggctgtagccttcctggcacccagtgcaactacctacatcggccttaatcctggttaccgtgtgtaccaaatagatggaaactactccgggagctctcacgtggtcctggaccatgagacctacatcctgaatctgacccaggcaaacataccgggagccataccgcactggcagcttctctacagggctcgagaaacctatgggctgcccaacacactgcctaccgcctggcacaacctggtatatcgcatgcggggcgacatgcaacttttccagaccttctggtttctctaccataagggccacccaccctcggagccctgtggcacgccctgccgtctggctactctttgtgcccagctctctgcccgtgctgacagccctgctctgtgccgccacctgatgccagatgggagcctcccagaggcccagagcctgtggccaaggccactgttttgcgggggaggaggctcaggtgggggtggcagtgacatccagatgacccagagccccagctccctgtcagccagtgtgggtgacagagtgaccatcacctgcagagccagccagagcatcagcagctacctgaactggtaccagcagaaacctggcaaagcccccaagctgctgatttatgctgctagcagcctgcagagtggagtgcccagcagattctcaggcagtggctctggcacagacttcaccctgaccatctccagcctgcagccagaagactttgccacctactactgccagcagagctacagcacccctcctatcacctttggccagggcacaagactggagatcaagcgaactgtggctgcaccatctgtcttcatcttcccgccatctgatgagcagttgaaatctggaactgcctctgttgtgtgcctgctgaataacttctatcccagagaggccaaagtacagtggaaggtggataacgccctccaatcgggtaactcccaggagagtgtcacagagcaggacagcaaggacagcacctacagcctcagcagcaccctgacgctgagcaaagcagactacgagaaacacaaagtctacgcctgcgaagtcacccatcagggcctgagctcgcccgtcacaaagagcttcaacaggggagagtgtggaagcggagctactaacttcagcctgctgaagcaggctggagacgtggaggagaaccctggacctatggcctttctgtggctgctgagctgttgggccctgctgggcaccaccttcggcgaggtccaactggttgaatctggagggggcctggtgcaacctggcaggagcctgagactgagctgtgctgcctctggcttcacctttgatgactatgccatgaactgggtgagacaggcccctggcaagggcctggagtgggtgtctggcatcagctggagctctggcagcatggactatgcagattctgtgaagggcaggttcaccatcagcagagataatgccaagaacagcctgtacctgcagatgaacagcctcaggacagaggacacagccctgtactactgtgccaaggccagagaagtgggtgactactatggcatggatgtgtggggccagggcaccacagtgacagtgagctctgcctccaccaagggcccatcggtcttccccctggcgccctgctccaggagcacctccgagagcacagccgccctgggctgcctggtcaaggactacttccccgaaccggtgacggtgtcgtggaactcaggcgccctgaccagcggcgtgcacaccttcccggctgtcctacagtcctcaggactctactccctcagcagcgtggtgaccgtgccctccagcagcttgggcacgaagacctacacctgcaacgtagatcacaagcccagcaacaccaaggtggacaagagagttgagtccaaatatggtccccca

SEQ ID NO: 827 - DNA, 2553 bp, synthetic construct
  source 1..2553: mol_type = other DNA
atgaagtgggtaacctttatttcccttctttttctcttttcctcggcttattcccggggtgtgtttcgtcgagatgcacttcaccctctttctccccaaggccatcctgccaggttacatcgcatagtgccccggctccgagatgtctttgggtgggggaacctcacctgcccaatctgcaaaggtctattcaccgccatcaacctcgggctgaagaaggaacccaatgtggctcgcgtgggctccgtggccatcaagctgtgcaatctgctgaagatagcaccacctgccgtgtgccaatccattgtccacctctttgaggatgacatggtggaggtgtggagacgctcagtgctgagcccatctgaggcctgtggcctgctcctgggctccacctgtgggcactgggacattttctcatcttggaacatctctttgcctactgtgccgaagccgccccccaaaccccctagccccccagccccaggtgcccctgtcagccgcatcctcttcctcactgacctgcactgggatcatgactacctggagggcacggaccctgactgtgcagacccactgtgctgccgccggggttctggcctgccgcccgcatcccggccaggtgccggatactggggcgaatacagcaagtgtgacctgcccctgaggaccctggagagcctgttgagtgggctgggcccagccggcccttttgatatggtgtactggacaggagacatccccgcacatgatgtctggcaccagactcgtcaggaccaactgcgggccctgaccaccgtcacagcacttgtgaggaagttcctggggccagtgccagtgtaccctgctgtgggtaaccatgaaagcacacctgtcaatagcttccctccccccttcattgagggcaaccactcctcccgctggctctatgaagcgatggccaaggcttgggagccctggctgcctgccgaagccctgcgcaccctcagaattggggggttctatgctctttccccataccccggtctccgcctcatctctctcaatatgaatttttgttcccgtgagaacttctggctcttgatcaactccacggatcccgcaggacagctccagtggctggtgggggagcttcaggctgctgaggatcgaggagacaaagtgcatataattggccacattcccccagggcactgtctgaagagctggagctggaattattaccgaattgtagccaggtatgagaacaccctggctgctcagttctttggccacactcatgtggatgaatttgaggtcttctatgatgaagagactctgagccggccgctggctgtagccttcctggcacccagtgcaactacctacatcggccttaatcctggttaccgtgtgtaccaaatagatggaaactactccgggagctctcacgtggtcctggaccatgagacctacatcctgaatctgacccaggcaaacataccgggagccataccgcactggcagcttctctacagggctcgagaaacctatgggctgcccaacacactgcctaccgcctggcacaacctggtatatcgcatgcggggcgacatgcaacttttccagaccttctggtttctctaccataagggccacccaccctcggagccctgtggcacgccctgccgtctggctactctttgtgcccagctctctgcccgtgctgacagccctgctctgtgccgccacctgatgccagatgggagcctcccagaggcccagagcctgtggccaaggccactgttttgcgggggaggaggctcaggtgggggtggcagtgacatccagatgacccagagccccagctccctgtcagccagtgtgggtgacagagtgaccatcacctgcagagccagccagagcatcagcagctacctgaactggtaccagcagaaacctggcaaagcccccaagctgctgatttatgctgctagcagcctgcagagtggagtgcccagcagattctcaggcagtggctctggcacagacttcaccctgaccatctccagcctgcagccagaagactttgccacctactactgccagcagagctacagcacccctcctatcacctttggccagggcacaagactggagatcaagggaggaggaggctctggaggaggaggctctggagggggaggctctgaggtccaactggttgaatctggagggggcctggtgcaacctggcaggagcctgagactgagctgtgctgcctctggcttcacctttgatgactatgccatgaactgggtgagacaggcccctggcaagggcctggagtgggtgtctggcatcagctggagctctggcagcatggactatgcagattctgtgaagggcaggttcaccatcagcagagataatgccaagaacagcctgtacctgcagatgaacagcctcaggacagaggacacagccctgtactactgtgccaaggccagagaagtgggtgactactatggcatggatgtgtggggccagggcaccacagtgacagtgagctct

SEQ ID NO: 828 - DNA, 2526 bp, synthetic construct
  source 1..2526: mol_type = other DNA
atgaagtgggtaacctttatttcccttctttttctcttttcctcggcttattcccggggtgtgtttcgtcgagatgcacttcaccctctttctccccaaggccatcctgccaggttacatcgcatagtgccccggctccgagatgtctttgggtgggggaacctcacctgcccaatctgcaaaggtctattcaccgccatcaacctcgggctgaagaaggaacccaatgtggctcgcgtgggctccgtggccatcaagctgtgcaatctgctgaagatagcaccacctgccgtgtgccaatccattgtccacctctttgaggatgacatggtggaggtgtggagacgctcagtgctgagcccatctgaggcctgtggcctgctcctgggctccacctgtgggcactgggacattttctcatcttggaacatctctttgcctactgtgccgaagccgccccccaaaccccctagccccccagccccaggtgcccctgtcagccgcatcctcttcctcactgacctgcactgggatcatgactacctggagggcacggaccctgactgtgcagacccactgtgctgccgccggggttctggcctgccgcccgcatcccggccaggtgccggatactggggcgaatacagcaagtgtgacctgcccctgaggaccctggagagcctgttgagtgggctgggcccagccggcccttttgatatggtgtactggacaggagacatccccgcacatgatgtctggcaccagactcgtcaggaccaactgcgggccctgaccaccgtcacagcacttgtgaggaagttcctggggccagtgccagtgtaccctgctgtgggtaaccatgaaagcacacctgtcaatagcttccctccccccttcattgagggcaaccactcctcccgctggctctatgaagcgatggccaaggcttgggagccctggctgcctgccgaagccctgcgcaccctcagaattggggggttctatgctctttccccataccccggtctccgcctcatctctctcaatatgaatttttgttcccgtgagaacttctggctcttgatcaactccacggatcccgcaggacagctccagtggctggtgggggagcttcaggctgctgaggatcgaggagacaaagtgcatataattggccacattcccccagggcactgtctgaagagctggagctggaattattaccgaattgtagccaggtatgagaacaccctggctgctcagttctttggccacactcatgtggatgaatttgaggtcttctatgatgaagagactctgagccggccgctggctgtagccttcctggcacccagtgcaactacctacatcggccttaatcctggttaccgtgtgtaccaaatagatggaaactactccgggagctctcacgtggtcctggaccatgagacctacatcctgaatctgacccaggcaaacataccgggagccataccgcactggcagcttctctacagggctcgagaaacctatgggctgcccaacacactgcctaccgcctggcacaacctggtatatcgcatgcggggcgacatgcaacttttccagaccttctggtttctctaccataagggccacccaccctcggagccctgtggcacgccctgccgtctggctactctttgtgcccagctctctgcccgtgctgacagccctgctctgtgccgccacctgatgccagatgggagcctcccagaggcccagagcctgtggccaaggccactgttttgcggaggtggtggaagtgaagtacagctcgtcgaaagtggcggtggtcttgttcagcctggaaactccctcaccctctcatgtgtcgcaagtggatttactttctcaaattatggaatgcattggattaggcaagcaccaaaaaaaggacttgaatggatagctatgatatattacgactcctctaaaatgaattacgcagatactgtaaaaggcaggtttacaatttctcgggataactctaaaaacactctttaccttgaaatgaactctcttagatccgaagatacagctatgtactattgcgcagtgccaactagtcattacgtcgtcgatgtttggggacaaggcgtaagtgtaacagtcagctcaggcggcggcggaagcggagggggaggatcaggaggaggcggatccgacattcagatgacacaatccccagcatccctctcagcatcactcgaagaaatcgtaacaatcacctgtcaagcatctcaagatatcggcaactggctcgcatggtaccaacagaaacccggcaaatcccctcaacttcttatttatggcgcaacatccctcgcagacggcgttccctcaaggttctcaggctcacgatcaggcactcagttctcacttaaaatctccagagttcaagtcgaagatataggaatttattattgtctccaagcatataacacaccatggacattcggcggcggcaccaaactcgaacttaaa

SEQ ID NO: 829 - DNA, 2661 bp, synthetic construct
  source 1..2661: mol_type = other DNA
atgaagtgggtaacctttatttcccttctttttctcttttcctcggcttattcccggggtgtgtttcgtcgagatgcacttcaccctctttctccccaaggccatcctgccaggttacatcgcatagtgccccggctccgagatgtctttgggtgggggaacctcacctgcccaatctgcaaaggtctattcaccgccatcaacctcgggctgaagaaggaacccaatgtggctcgcgtgggctccgtggccatcaagctgtgcaatctgctgaagatagcaccacctgccgtgtgccaatccattgtccacctctttgaggatgacatggtggaggtgtggagacgctcagtgctgagcccatctgaggcctgtggcctgctcctgggctccacctgtgggcactgggacattttctcatcttggaacatctctttgcctactgtgccgaagccgccccccaaaccccctagccccccagccccaggtgcccctgtcagccgcatcctcttcctcactgacctgcactgggatcatgactacctggagggcacggaccctgactgtgcagacccactgtgctgccgccggggttctggcctgccgcccgcatcccggccaggtgccggatactggggcgaatacagcaagtgtgacctgcccctgaggaccctggagagcctgttgagtgggctgggcccagccggcccttttgatatggtgtactggacaggagacatccccgcacatgatgtctggcaccagactcgtcaggaccaactgcgggccctgaccaccgtcacagcacttgtgaggaagttcctggggccagtgccagtgtaccctgctgtgggtaaccatgaaagcacacctgtcaatagcttccctccccccttcattgagggcaaccactcctcccgctggctctatgaagcgatggccaaggcttgggagccctggctgcctgccgaagccctgcgcaccctcagaattggggggttctatgctctttccccataccccggtctccgcctcatctctctcaatatgaatttttgttcccgtgagaacttctggctcttgatcaactccacggatcccgcaggacagctccagtggctggtgggggagcttcaggctgctgaggatcgaggagacaaagtgcatataattggccacattcccccagggcactgtctgaagagctggagctggaattattaccgaattgtagccaggtatgagaacaccctggctgctcagttctttggccacactcatgtggatgaatttgaggtcttctatgatgaagagactctgagccggccgctggctgtagccttcctggcacccagtgcaactacctacatcggccttaatcctggttaccgtgtgtaccaaatagatggaaactactccgggagctctcacgtggtcctggaccatgagacctacatcctgaatctgacccaggcaaacataccgggagccataccgcactggcagcttctctacagggctcgagaaacctatgggctgcccaacacactgcctaccgcctggcacaacctggtatatcgcatgcggggcgacatgcaacttttccagaccttctggtttctctaccataagggccacccaccctcggagccctgtggcacgccctgccgtctggctactctttgtgcccagctctctgcccgtgctgacagccctgctctgtgccgccacctgatgccagatgggagcctcccagaggcccagagcctgtggccaaggccactgttttgcgctgaggccgcggccaaggaagcggctgcaaaggaggctgctgcaaaagaggccgctgctaaagccctggaggcagaagcagcagccaaggaggcggcagctaaggaagccgcagccaaagaagctgccgccaaggccgacatccagatgacccagagccccagctccctgtcagccagtgtgggtgacagagtgaccatcacctgcagagccagccagagcatcagcagctacctgaactggtaccagcagaaacctggcaaagcccccaagctgctgatttatgctgctagcagcctgcagagtggagtgcccagcagattctcaggcagtggctctggcacagacttcaccctgaccatctccagcctgcagccagaagactttgccacctactactgccagcagagctacagcacccctcctatcacctttggccagggcacaagactggagatcaagggaggaggaggctctggaggaggaggctctggagggggaggctctgaggtccaactggttgaatctggagggggcctggtgcaacctggcaggagcctgagactgagctgtgctgcctctggcttcacctttgatgactatgccatgaactgggtgagacaggcccctggcaagggcctggagtgggtgtctggcatcagctggagctctggcagcatggactatgcagattctgtgaagggcaggttcaccatcagcagagataatgccaagaacagcctgtacctgcagatgaacagcctcaggacagaggacacagccctgtactactgtgccaaggccagagaagtgggtgactactatggcatggatgtgtggggccagggcaccacagtgacagtgagctct

SEQ ID NO: 830 - DNA, 2568 bp, synthetic construct
  source 1..2568: mol_type = other DNA
atgaagtgggtaacctttatttcccttctttttctcttttcctcggcttattcccggggtgtgtttcgtcgagatgcacttcaccctctttctccccaaggccatcctgccaggttacatcgcatagtgccccggctccgagatgtctttgggtgggggaacctcacctgcccaatctgcaaaggtctattcaccgccatcaacctcgggctgaagaaggaacccaatgtggctcgcgtgggctccgtggccatcaagctgtgcaatctgctgaagatagcaccacctgccgtgtgccaatccattgtccacctctttgaggatgacatggtggaggtgtggagacgctcagtgctgagcccatctgaggcctgtggcctgctcctgggctccacctgtgggcactgggacattttctcatcttggaacatctctttgcctactgtgccgaagccgccccccaaaccccctagccccccagccccaggtgcccctgtcagccgcatcctcttcctcactgacctgcactgggatcatgactacctggagggcacggaccctgactgtgcagacccactgtgctgccgccggggttctggcctgccgcccgcatcccggccaggtgccggatactggggcgaatacagcaagtgtgacctgcccctgaggaccctggagagcctgttgagtgggctgggcccagccggcccttttgatatggtgtactggacaggagacatccccgcacatgatgtctggcaccagactcgtcaggaccaactgcgggccctgaccaccgtcacagcacttgtgaggaagttcctggggccagtgccagtgtaccctgctgtgggtaaccatgaaagcacacctgtcaatagcttccctccccccttcattgagggcaaccactcctcccgctggctctatgaagcgatggccaaggcttgggagccctggctgcctgccgaagccctgcgcaccctcagaattggggggttctatgctctttccccataccccggtctccgcctcatctctctcaatatgaatttttgttcccgtgagaacttctggctcttgatcaactccacggatcccgcaggacagctccagtggctggtgggggagcttcaggctgctgaggatcgaggagacaaagtgcatataattggccacattcccccagggcactgtctgaagagctggagctggaattattaccgaattgtagccaggtatgagaacaccctggctgctcagttctttggccacactcatgtggatgaatttgaggtcttctatgatgaagagactctgagccggccgctggctgtagccttcctggcacccagtgcaactacctacatcggccttaatcctggttaccgtgtgtaccaaatagatggaaactactccgggagctctcacgtggtcctggaccatgagacctacatcctgaatctgacccaggcaaacataccgggagccataccgcactggcagcttctctacagggctcgagaaacctatgggctgcccaacacactgcctaccgcctggcacaacctggtatatcgcatgcggggcgacatgcaacttttccagaccttctggtttctctaccataagggccacccaccctcggagccctgtggcacgccctgccgtctggctactctttgtgcccagctctctgcccgtgctgacagccctgctctgtgccgccacctgatgccagatgggagcctcccagaggcccagagcctgtggccaaggccactgttttgcggaggaggaggctctggaggaggaggctctggagggggaggctctgacatccagatgacccagagccccagctccctgtcagccagtgtgggtgacagagtgaccatcacctgcagagccagccagagcatcagcagctacctgaactggtaccagcagaaacctggcaaagcccccaagctgctgatttatgctgctagcagcctgcagagtggagtgcccagcagattctcaggcagtggctctggcacagacttcaccctgaccatctccagcctgcagccagaagactttgccacctactactgccagcagagctacagcacccctcctatcacctttggccagggcacaagactggagatcaagggaggaggaggctctggaggaggaggctctggagggggaggctctgaggtccaactggttgaatctggagggggcctggtgcaacctggcaggagcctgagactgagctgtgctgcctctggcttcacctttgatgactatgccatgaactgggtgagacaggcccctggcaagggcctggagtgggtgtctggcatcagctggagctctggcagcatggactatgcagattctgtgaagggcaggttcaccatcagcagagataatgccaagaacagcctgtacctgcagatgaacagcctcaggacagaggacacagccctgtactactgtgccaaggccagagaagtgggtgactactatggcatggatgtgtggggccagggcaccacagtgacagtgagctct

SEQ ID NO: 831 - DNA, 2553 bp, synthetic construct
  source 1..2553: mol_type = other DNA
atgaagtgggtaacctttatttcccttctttttctcttttcctcggcttattcccggggtgtgtttcgtcgagatgcacttgaggtccaactggttgaatctggagggggcctggtgcaacctggcaggagcctgagactgagctgtgctgcctctggcttcacctttgatgactatgccatgaactgggtgagacaggcccctggcaagggcctggagtgggtgtctggcatcagctggagctctggcagcatggactatgcagattctgtgaagggcaggttcaccatcagcagagataatgccaagaacagcctgtacctgcagatgaacagcctcaggacagaggacacagccctgtactactgtgccaaggccagagaagtgggtgactactatggcatggatgtgtggggccagggcaccacagtgacagtgagctctggaggaggaggctctggaggaggaggctctggagggggaggctctgacatccagatgacccagagccccagctccctgtcagccagtgtgggtgacagagtgaccatcacctgcagagccagccagagcatcagcagctacctgaactggtaccagcagaaacctggcaaagcccccaagctgctgatttatgctgctagcagcctgcagagtggagtgcccagcagattctcaggcagtggctctggcacagacttcaccctgaccatctccagcctgcagccagaagactttgccacctactactgccagcagagctacagcacccctcctatcacctttggccagggcacaagactggagatcaaggggggaggaggctcaggtgggggtggcagtcaccctctttctccccaaggccatcctgccaggttacatcgcatagtgccccggctccgagatgtctttgggtgggggaacctcacctgcccaatctgcaaaggtctattcaccgccatcaacctcgggctgaagaaggaacccaatgtggctcgcgtgggctccgtggccatcaagctgtgcaatctgctgaagatagcaccacctgccgtgtgccaatccattgtccacctctttgaggatgacatggtggaggtgtggagacgctcagtgctgagcccatctgaggcctgtggcctgctcctgggctccacctgtgggcactgggacattttctcatcttggaacatctctttgcctactgtgccgaagccgccccccaaaccccctagccccccagccccaggtgcccctgtcagccgcatcctcttcctcactgacctgcactgggatcatgactacctggagggcacggaccctgactgtgcagacccactgtgctgccgccggggttctggcctgccgcccgcatcccggccaggtgccggatactggggcgaatacagcaagtgtgacctgcccctgaggaccctggagagcctgttgagtgggctgggcccagccggcccttttgatatggtgtactggacaggagacatccccgcacatgatgtctggcaccagactcgtcaggaccaactgcgggccctgaccaccgtcacagcacttgtgaggaagttcctggggccagtgccagtgtaccctgctgtgggtaaccatgaaagcacacctgtcaatagcttccctccccccttcattgagggcaaccactcctcccgctggctctatgaagcgatggccaaggcttgggagccctggctgcctgccgaagccctgcgcaccctcagaattggggggttctatgctctttccccataccccggtctccgcctcatctctctcaatatgaatttttgttcccgtgagaacttctggctcttgatcaactccacggatcccgcaggacagctccagtggctggtgggggagcttcaggctgctgaggatcgaggagacaaagtgcatataattggccacattcccccagggcactgtctgaagagctggagctggaattattaccgaattgtagccaggtatgagaacaccctggctgctcagttctttggccacactcatgtggatgaatttgaggtcttctatgatgaagagactctgagccggccgctggctgtagccttcctggcacccagtgcaactacctacatcggccttaatcctggttaccgtgtgtaccaaatagatggaaactactccgggagctctcacgtggtcctggaccatgagacctacatcctgaatctgacccaggcaaacataccgggagccataccgcactggcagcttctctacagggctcgagaaacctatgggctgcccaacacactgcctaccgcctggcacaacctggtatatcgcatgcggggcgacatgcaacttttccagaccttctggtttctctaccataagggccacccaccctcggagccctgtggcacgccctgccgtctggctactctttgtgcccagctctctgcccgtgctgacagccctgctctgtgccgccacctgatgccagatgggagcctcccagaggcccagagcctgtggccaaggccactgttttgc

SEQ ID NO: 832 - DNA, 3183 bp, synthetic construct
  source 1..3183: mol_type = other DNA
gaggtccaactggttgaatctggagggggcctggtgcaacctggcaggagcctgagactgagctgtgctgcctctggcttcacctttgatgactatgccatgaactgggtgagacaggcccctggcaagggcctggagtgggtgtctggcatcagctggagctctggcagcatggactatgcagattctgtgaagggcaggttcaccatcagcagagataatgccaagaacagcctgtacctgcagatgaacagcctcaggacagaggacacagccctgtactactgtgccaaggccagagaagtgggtgactactatggcatggatgtgtggggccagggcaccacagtgacagtgagctctgcctccaccaagggcccatcggtcttccccctggcgccctgctccaggagcacctccgagagcacagccgccctgggctgcctggtcaaggactacttccccgaaccggtgacggtgtcgtggaactcaggcgccctgaccagcggcgtgcacaccttcccggctgtcctacagtcctcaggactctactccctcagcagcgtggtgaccgtgccctccagcagcttgggcacgaagacctacacctgcaacgtagatcacaagcccagcaacaccaaggtggacaagagagttgagtccaaatatggtcccccaggaagcggagctactaacttcagcctgctgaagcaggctggagacgtggaggagaaccctggacctatggcctttctgtggctgctgagctgttgggccctgctgggcaccaccttcggcgacatccagatgacccagagccccagctccctgtcagccagtgtgggtgacagagtgaccatcacctgcagagccagccagagcatcagcagctacctgaactggtaccagcagaaacctggcaaagcccccaagctgctgatttatgctgctagcagcctgcagagtggagtgcccagcagattctcaggcagtggctctggcacagacttcaccctgaccatctccagcctgcagccagaagactttgccacctactactgccagcagagctacagcacccctcctatcacctttggccagggcacaagactggagatcaagcgaactgtggctgcaccatctgtcttcatcttcccgccatctgatgagcagttgaaatctggaactgcctctgttgtgtgcctgctgaataacttctatcccagagaggccaaagtacagtggaaggtggataacgccctccaatcgggtaactcccaggagagtgtcacagagcaggacagcaaggacagcacctacagcctcagcagcaccctgacgctgagcaaagcagactacgagaaacacaaagtctacgcctgcgaagtcacccatcagggcctgagctcgcccgtcacaaagagcttcaacaggggagagtgtgggggaggaggctcaggtgggggtggcagtcaccctctttctccccaaggccatcctgccaggttacatcgcatagtgccccggctccgagatgtctttgggtgggggaacctcacctgcccaatctgcaaaggtctattcaccgccatcaacctcgggctgaagaaggaacccaatgtggctcgcgtgggctccgtggccatcaagctgtgcaatctgctgaagatagcaccacctgccgtgtgccaatccattgtccacctctttgaggatgacatggtggaggtgtggagacgctcagtgctgagcccatctgaggcctgtggcctgctcctgggctccacctgtgggcactgggacattttctcatcttggaacatctctttgcctactgtgccgaagccgccccccaaaccccctagccccccagccccaggtgcccctgtcagccgcatcctcttcctcactgacctgcactgggatcatgactacctggagggcacggaccctgactgtgcagacccactgtgctgccgccggggttctggcctgccgcccgcatcccggccaggtgccggatactggggcgaatacagcaagtgtgacctgcccctgaggaccctggagagcctgttgagtgggctgggcccagccggcccttttgatatggtgtactggacaggagacatccccgcacatgatgtctggcaccagactcgtcaggaccaactgcgggccctgaccaccgtcacagcacttgtgaggaagttcctggggccagtgccagtgtaccctgctgtgggtaaccatgaaagcacacctgtcaatagcttccctccccccttcattgagggcaaccactcctcccgctggctctatgaagcgatggccaaggcttgggagccctggctgcctgccgaagccctgcgcaccctcagaattggggggttctatgctctttccccataccccggtctccgcctcatctctctcaatatgaatttttgttcccgtgagaacttctggctcttgatcaactccacggatcccgcaggacagctccagtggctggtgggggagcttcaggctgctgaggatcgaggagacaaagtgcatataattggccacattcccccagggcactgtctgaagagctggagctggaattattaccgaattgtagccaggtatgagaacaccctggctgctcagttctttggccacactcatgtggatgaatttgaggtcttctatgatgaagagactctgagccggccgctggctgtagccttcctggcacccagtgcaactacctacatcggccttaatcctggttaccgtgtgtaccaaatagatggaaactactccgggagctctcacgtggtcctggaccatgagacctacatcctgaatctgacccaggcaaacataccgggagccataccgcactggcagcttctctacagggctcgagaaacctatgggctgcccaacacactgcctaccgcctggcacaacctggtatatcgcatgcggggcgacatgcaacttttccagaccttctggtttctctaccataagggccacccaccctcggagccctgtggcacgccctgccgtctggctactctttgtgcccagctctctgcccgtgctgacagccctgctctgtgccgccacctgatgccagatgggagcctcccagaggcccagagcctgtggccaaggccactgttttgc

SEQ ID NO: 833 - protein, 1061 aa, synthetic construct
EVQLVESGGGLVQPGRSLRLSCAASGFTFDDYAMNWVRQAPGKGLEWVSGISWSSGSMDYADSVKGRFTISRDNAKNSLYLQMNSLRTEDTALYYCAKAREVGDYYGMDVWGQGTTVTVSSASTKGPSVFPLAPCSRSTSESTAALGCLVKDYFPEPVTVSWNSGALTSGVHTFPAVLQSSGLYSLSSVVTVPSSSLGTKTYTCNVDHKPSNTKVDKRVESKYGPPGSGATNFSLLKQAGDVEENPGPMAFLWLLSCWALLGTTFGDIQMTQSPSSLSASVGDRVTITCRASQSISSYLNWYQQKPGKAPKLLIYAASSLQSGVPSRFSGSGSGTDFTLTISSLQPEDFATYYCQQSYSTPPITFGQGTRLEIKRTVAAPSVFIFPPSDEQLKSGTASVVCLLNNFYPREAKVQWKVDNALQSGNSQESVTEQDSKDSTYSLSSTLTLSKADYEKHKVYACEVTHQGLSSPVTKSFNRGECGGGGSGGGGSHPLSPQGHPARLHRIVPRLRDVFGWGNLTCPICKGLFTAINLGLKKEPNVARVGSVAIKLCNLLKIAPPAVCQSIVHLFEDDMVEVWRRSVLSPSEACGLLLGSTCGHWDIFSSWNISLPTVPKPPPKPPSPPAPGAPVSRILFLTDLHWDHDYLEGTDPDCADPLCCRRGSGLPPASRPGAGYWGEYSKCDLPLRTLESLLSGLGPAGPFDMVYWTGDIPAHDVWHQTRQDQLRALTTVTALVRKFLGPVPVYPAVGNHESTPVNSFPPPFIEGNHSSRWLYEAMAKAWEPWLPAEALRTLRIGGFYALSPYPGLRLISLNMNFCSRENFWLLINSTDPAGQLQWLVGELQAAEDRGDKVHIIGHIPPGHCLKSWSWNYYRIVARYENTLAAQFFGHTHVDEFEVFYDEETLSRPLAVAFLAPSATTYIGLNPGYRVYQIDGNYSGSSHVVLDHETYILNLTQANIPGAIPHWQLLYRARETYGLPNTLPTAWHNLVYRMRGDMQLFQTFWFLYHKGHPPSEPCGTPCRLATLCAQLSARADSPALCRHLMPDGSLPEAQSLWPRPLFC

SEQ ID NO: 834 - DNA, 3183 bp, synthetic construct
  source 1..3183: mol_type = other DNA
gacatccagatgacccagagccccagctccctgtcagccagtgtgggtgacagagtgaccatcacctgcagagccagccagagcatcagcagctacctgaactggtaccagcagaaacctggcaaagcccccaagctgctgatttatgctgctagcagcctgcagagtggagtgcccagcagattctcaggcagtggctctggcacagacttcaccctgaccatctccagcctgcagccagaagactttgccacctactactgccagcagagctacagcacccctcctatcacctttggccagggcacaagactggagatcaagcgaactgtggctgcaccatctgtcttcatcttcccgccatctgatgagcagttgaaatctggaactgcctctgttgtgtgcctgctgaataacttctatcccagagaggccaaagtacagtggaaggtggataacgccctccaatcgggtaactcccaggagagtgtcacagagcaggacagcaaggacagcacctacagcctcagcagcaccctgacgctgagcaaagcagactacgagaaacacaaagtctacgcctgcgaagtcacccatcagggcctgagctcgcccgtcacaaagagcttcaacaggggagagtgtggaagcggagctactaacttcagcctgctgaagcaggctggagacgtggaggagaaccctggacctatggcctttctgtggctgctgagctgttgggccctgctgggcaccaccttcggcgaggtccaactggttgaatctggagggggcctggtgcaacctggcaggagcctgagactgagctgtgctgcctctggcttcacctttgatgactatgccatgaactgggtgagacaggcccctggcaagggcctggagtgggtgtctggcatcagctggagctctggcagcatggactatgcagattctgtgaagggcaggttcaccatcagcagagataatgccaagaacagcctgtacctgcagatgaacagcctcaggacagaggacacagccctgtactactgtgccaaggccagagaagtgggtgactactatggcatggatgtgtggggccagggcaccacagtgacagtgagctctgcctccaccaagggcccatcggtcttccccctggcgccctgctccaggagcacctccgagagcacagccgccctgggctgcctggtcaaggactacttccccgaaccggtgacggtgtcgtggaactcaggcgccctgaccagcggcgtgcacaccttcccggctgtcctacagtcctcaggactctactccctcagcagcgtggtgaccgtgccctccagcagcttgggcacgaagacctacacctgcaacgtagatcacaagcccagcaacaccaaggtggacaagagagttgagtccaaatatggtcccccagggggaggaggctcaggtgggggtggcagtcaccctctttctccccaaggccatcctgccaggttacatcgcatagtgccccggctccgagatgtctttgggtgggggaacctcacctgcccaatctgcaaaggtctattcaccgccatcaacctcgggctgaagaaggaacccaatgtggctcgcgtgggctccgtggccatcaagctgtgcaatctgctgaagatagcaccacctgccgtgtgccaatccattgtccacctctttgaggatgacatggtggaggtgtggagacgctcagtgctgagcccatctgaggcctgtggcctgctcctgggctccacctgtgggcactgggacattttctcatcttggaacatctctttgcctactgtgccgaagccgccccccaaaccccctagccccccagccccaggtgcccctgtcagccgcatcctcttcctcactgacctgcactgggatcatgactacctggagggcacggaccctgactgtgcagacccactgtgctgccgccggggttctggcctgccgcccgcatcccggccaggtgccggatactggggcgaatacagcaagtgtgacctgcccctgaggaccctggagagcctgttgagtgggctgggcccagccggcccttttgatatggtgtactggacaggagacatccccgcacatgatgtctggcaccagactcgtcaggaccaactgcgggccctgaccaccgtcacagcacttgtgaggaagttcctggggccagtgccagtgtaccctgctgtgggtaaccatgaaagcacacctgtcaatagcttccctccccccttcattgagggcaaccactcctcccgctggctctatgaagcgatggccaaggcttgggagccctggctgcctgccgaagccctgcgcaccctcagaattggggggttctatgctctttccccataccccggtctccgcctcatctctctcaatatgaatttttgttcccgtgagaacttctggctcttgatcaactccacggatcccgcaggacagctccagtggctggtgggggagcttcaggctgctgaggatcgaggagacaaagtgcatataattggccacattcccccagggcactgtctgaagagctggagctggaattattaccgaattgtagccaggtatgagaacaccctggctgctcagttctttggccacactcatgtggatgaatttgaggtcttctatgatgaagagactctgagccggccgctggctgtagccttcctggcacccagtgcaactacctacatcggccttaatcctggttaccgtgtgtaccaaatagatggaaactactccgggagctctcacgtggtcctggaccatgagacctacatcctgaatctgacccaggcaaacataccgggagccataccgcactggcagcttctctacagggctcgagaaacctatgggctgcccaacacactgcctaccgcctggcacaacctggtatatcgcatgcggggcgacatgcaacttttccagaccttctggtttctctaccataagggccacccaccctcggagccctgtggcacgccctgccgtctggctactctttgtgcccagctctctgcccgtgctgacagccctgctctgtgccgccacctgatgccagatgggagcctcccagaggcccagagcctgtggccaaggccactgttttgc

SEQ ID NO: 835 - protein, 1061 aa, synthetic construct
DIQMTQSPSSLSASVGDRVTITCRASQSISSYLNWYQQKPGKAPKLLIYAASSLQSGVPSRFSGSGSGTDFTLTISSLQPEDFATYYCQQSYSTPPITFGQGTRLEIKRTVAAPSVFIFPPSDEQLKSGTASVVCLLNNFYPREAKVQWKVDNALQSGNSQESVTEQDSKDSTYSLSSTLTLSKADYEKHKVYACEVTHQGLSSPVTKSFNRGECGSGATNFSLLKQAGDVEENPGPMAFLWLLSCWALLGTTFGEVQLVESGGGLVQPGRSLRLSCAASGFTFDDYAMNWVRQAPGKGLEWVSGISWSSGSMDYADSVKGRFTISRDNAKNSLYLQMNSLRTEDTALYYCAKAREVGDYYGMDVWGQGTTVTVSSASTKGPSVFPLAPCSRSTSESTAALGCLVKDYFPEPVTVSWNSGALTSGVHTFPAVLQSSGLYSLSSVVTVPSSSLGTKTYTCNVDHKPSNTKVDKRVESKYGPPGGGGSGGGGSHPLSPQGHPARLHRIVPRLRDVFGWGNLTCPICKGLFTAINLGLKKEPNVARVGSVAIKLCNLLKIAPPAVCQSIVHLFEDDMVEVWRRSVLSPSEACGLLLGSTCGHWDIFSSWNISLPTVPKPPPKPPSPPAPGAPVSRILFLTDLHWDHDYLEGTDPDCADPLCCRRGSGLPPASRPGAGYWGEYSKCDLPLRTLESLLSGLGPAGPFDMVYWTGDIPAHDVWHQTRQDQLRALTTVTALVRKFLGPVPVYPAVGNHESTPVNSFPPPFIEGNHSSRWLYEAMAKAWEPWLPAEALRTLRIGGFYALSPYPGLRLISLNMNFCSRENFWLLINSTDPAGQLQWLVGELQAAEDRGDKVHIIGHIPPGHCLKSWSWNYYRIVARYENTLAAQFFGHTHVDEFEVFYDEETLSRPLAVAFLAPSATTYIGLNPGYRVYQIDGNYSGSSHVVLDHETYILNLTQANIPGAIPHWQLLYRARETYGLPNTLPTAWHNLVYRMRGDMQLFQTFWFLYHKGHPPSEPCGTPCRLATLCAQLSARADSPALCRHLMPDGSLPEAQSLWPRPLFC

SEQ ID NO: 836 - DNA, 2472 bp, synthetic construct
  source 1..2472: mol_type = other DNA
gacatccagatgacccagagccccagctccctgtcagccagtgtgggtgacagagtgaccatcacctgcagagccagccagagcatcagcagctacctgaactggtaccagcagaaacctggcaaagcccccaagctgctgatttatgctgctagcagcctgcagagtggagtgcccagcagattctcaggcagtggctctggcacagacttcaccctgaccatctccagcctgcagccagaagactttgccacctactactgccagcagagctacagcacccctcctatcacctttggccagggcacaagactggagatcaagggaggaggaggctctggaggaggaggctctggagggggaggctctgaggtccaactggttgaatctggagggggcctggtgcaacctggcaggagcctgagactgagctgtgctgcctctggcttcacctttgatgactatgccatgaactgggtgagacaggcccctggcaagggcctggagtgggtgtctggcatcagctggagctctggcagcatggactatgcagattctgtgaagggcaggttcaccatcagcagagataatgccaagaacagcctgtacctgcagatgaacagcctcaggacagaggacacagccctgtactactgtgccaaggccagagaagtgggtgactactatggcatggatgtgtggggccagggcaccacagtgacagtgagctctgggggaggaggctcaggtgggggtggcagtcaccctctttctccccaaggccatcctgccaggttacatcgcatagtgccccggctccgagatgtctttgggtgggggaacctcacctgcccaatctgcaaaggtctattcaccgccatcaacctcgggctgaagaaggaacccaatgtggctcgcgtgggctccgtggccatcaagctgtgcaatctgctgaagatagcaccacctgccgtgtgccaatccattgtccacctctttgaggatgacatggtggaggtgtggagacgctcagtgctgagcccatctgaggcctgtggcctgctcctgggctccacctgtgggcactgggacattttctcatcttggaacatctctttgcctactgtgccgaagccgccccccaaaccccctagccccccagccccaggtgcccctgtcagccgcatcctcttcctcactgacctgcactgggatcatgactacctggagggcacggaccctgactgtgcagacccactgtgctgccgccggggttctggcctgccgcccgcatcccggccaggtgccggatactggggcgaatacagcaagtgtgacctgcccctgaggaccctggagagcctgttgagtgggctgggcccagccggcccttttgatatggtgtactggacaggagacatccccgcacatgatgtctggcaccagactcgtcaggaccaactgcgggccctgaccaccgtcacagcacttgtgaggaagttcctggggccagtgccagtgtaccctgctgtgggtaaccatgaaagcacacctgtcaatagcttccctccccccttcattgagggcaaccactcctcccgctggctctatgaagcgatggccaaggcttgggagccctggctgcctgccgaagccctgcgcaccctcagaattggggggttctatgctctttccccataccccggtctccgcctcatctctctcaatatgaatttttgttcccgtgagaacttctggctcttgatcaactccacggatcccgcaggacagctccagtggctggtgggggagcttcaggctgctgaggatcgaggagacaaagtgcatataattggccacattcccccagggcactgtctgaagagctggagctggaattattaccgaattgtagccaggtatgagaacaccctggctgctcagttctttggccacactcatgtggatgaatttgaggtcttctatgatgaagagactctgagccggccgctggctgtagccttcctggcacccagtgcaactacctacatcggccttaatcctggttaccgtgtgtaccaaatagatggaaactactccgggagctctcacgtggtcctggaccatgagacctacatcctgaatctgacccaggcaaacataccgggagccataccgcactggcagcttctctacagggctcgagaaacctatgggctgcccaacacactgcctaccgcctggcacaacctggtatatcgcatgcggggcgacatgcaacttttccagaccttctggtttctctaccataagggccacccaccctcggagccctgtggcacgccctgccgtctggctactctttgtgcccagctctctgcccgtgctgacagccctgctctgtgccgccacctgatgccagatgggagcctcccagaggcccagagcctgtggccaaggccactgttttgc

SEQ ID NO: 837 - protein, 824 aa, synthetic construct
DIQMTQSPSSLSASVGDRVTITCRASQSISSYLNWYQQKPGKAPKLLIYAASSLQSGVPSRFSGSGSGTDFTLTISSLQPEDFATYYCQQSYSTPPITFGQGTRLEIKGGGGSGGGGSGGGGSEVQLVESGGGLVQPGRSLRLSCAASGFTFDDYAMNWVRQAPGKGLEWVSGISWSSGSMDYADSVKGRFTISRDNAKNSLYLQMNSLRTEDTALYYCAKAREVGDYYGMDVWGQGTTVTVSSGGGGSGGGGSHPLSPQGHPARLHRIVPRLRDVFGWGNLTCPICKGLFTAINLGLKKEPNVARVGSVAIKLCNLLKIAPPAVCQSIVHLFEDDMVEVWRRSVLSPSEACGLLLGSTCGHWDIFSSWNISLPTVPKPPPKPPSPPAPGAPVSRILFLTDLHWDHDYLEGTDPDCADPLCCRRGSGLPPASRPGAGYWGEYSKCDLPLRTLESLLSGLGPAGPFDMVYWTGDIPAHDVWHQTRQDQLRALTTVTALVRKFLGPVPVYPAVGNHESTPVNSFPPPFIEGNHSSRWLYEAMAKAWEPWLPAEALRTLRIGGFYALSPYPGLRLISLNMNFCSRENFWLLINSTDPAGQLQWLVGELQAAEDRGDKVHIIGHIPPGHCLKSWSWNYYRIVARYENTLAAQFFGHTHVDEFEVFYDEETLSRPLAVAFLAPSATTYIGLNPGYRVYQIDGNYSGSSHVVLDHETYILNLTQANIPGAIPHWQLLYRARETYGLPNTLPTAWHNLVYRMRGDMQLFQTFWFLYHKGHPPSEPCGTPCRLATLCAQLSARADSPALCRHLMPDGSLPEAQSLWPRPLFC

SEQ ID NO: 838 - DNA, 2580 bp, synthetic construct
  source 1..2580: mol_type = other DNA
gacatccagatgacccagagccccagctccctgtcagccagtgtgggtgacagagtgaccatcacctgcagagccagccagagcatcagcagctacctgaactggtaccagcagaaacctggcaaagcccccaagctgctgatttatgctgctagcagcctgcagagtggagtgcccagcagattctcaggcagtggctctggcacagacttcaccctgaccatctccagcctgcagccagaagactttgccacctactactgccagcagagctacagcacccctcctatcacctttggccagggcacaagactggagatcaagggaggaggaggctctggaggaggaggctctggagggggaggctctgaggtccaactggttgaatctggagggggcctggtgcaacctggcaggagcctgagactgagctgtgctgcctctggcttcacctttgatgactatgccatgaactgggtgagacaggcccctggcaagggcctggagtgggtgtctggcatcagctggagctctggcagcatggactatgcagattctgtgaagggcaggttcaccatcagcagagataatgccaagaacagcctgtacctgcagatgaacagcctcaggacagaggacacagccctgtactactgtgccaaggccagagaagtgggtgactactatggcatggatgtgtggggccagggcaccacagtgacagtgagctctgctgaggccgcggccaaggaagcggctgcaaaggaggctgctgcaaaagaggccgctgctaaagccctggaggcagaagcagcagccaaggaggcggcagctaaggaagccgcagccaaagaagctgccgccaaggcccaccctctttctccccaaggccatcctgccaggttacatcgcatagtgccccggctccgagatgtctttgggtgggggaacctcacctgcccaatctgcaaaggtctattcaccgccatcaacctcgggctgaagaaggaacccaatgtggctcgcgtgggctccgtggccatcaagctgtgcaatctgctgaagatagcaccacctgccgtgtgccaatccattgtccacctctttgaggatgacatggtggaggtgtggagacgctcagtgctgagcccatctgaggcctgtggcctgctcctgggctccacctgtgggcactgggacattttctcatcttggaacatctctttgcctactgtgccgaagccgccccccaaaccccctagccccccagccccaggtgcccctgtcagccgcatcctcttcctcactgacctgcactgggatcatgactacctggagggcacggaccctgactgtgcagacccactgtgctgccgccggggttctggcctgccgcccgcatcccggccaggtgccggatactggggcgaatacagcaagtgtgacctgcccctgaggaccctggagagcctgttgagtgggctgggcccagccggcccttttgatatggtgtactggacaggagacatccccgcacatgatgtctggcaccagactcgtcaggaccaactgcgggccctgaccaccgtcacagcacttgtgaggaagttcctggggccagtgccagtgtaccctgctgtgggtaaccatgaaagcacacctgtcaatagcttccctccccccttcattgagggcaaccactcctcccgctggctctatgaagcgatggccaaggcttgggagccctggctgcctgccgaagccctgcgcaccctcagaattggggggttctatgctctttccccataccccggtctccgcctcatctctctcaatatgaatttttgttcccgtgagaacttctggctcttgatcaactccacggatcccgcaggacagctccagtggctggtgggggagcttcaggctgctgaggatcgaggagacaaagtgcatataattggccacattcccccagggcactgtctgaagagctggagctggaattattaccgaattgtagccaggtatgagaacaccctggctgctcagttctttggccacactcatgtggatgaatttgaggtcttctatgatgaagagactctgagccggccgctggctgtagccttcctggcacccagtgcaactacctacatcggccttaatcctggttaccgtgtgtaccaaatagatggaaactactccgggagctctcacgtggtcctggaccatgagacctacatcctgaatctgacccaggcaaacataccgggagccataccgcactggcagcttctctacagggctcgagaaacctatgggctgcccaacacactgcctaccgcctggcacaacctggtatatcgcatgcggggcgacatgcaacttttccagaccttctggtttctctaccataagggccacccaccctcggagccctgtggcacgccctgccgtctggctactctttgtgcccagctctctgcccgtgctgacagccctgctctgtgccgccacctgatgccagatgggagcctcccagaggcccagagcctgtggccaaggccactgttttgc

SEQ ID NO: 839 - protein, 860 aa, synthetic construct
DIQMTQSPSSLSASVGDRVTITCRASQSISSYLNWYQQKPGKAPKLLIYAASSLQSGVPSRFSGSGSGTDFTLTISSLQPEDFATYYCQQSYSTPPITFGQGTRLEIKGGGGSGGGGSGGGGSEVQLVESGGGLVQPGRSLRLSCAASGFTFDDYAMNWVRQAPGKGLEWVSGISWSSGSMDYADSVKGRFTISRDNAKNSLYLQMNSLRTEDTALYYCAKAREVGDYYGMDVWGQGTTVTVSSAEAAAKEAAAKEAAAKEAAAKALEAEAAAKEAAAKEAAAKEAAAKAHPLSPQGHPARLHRIVPRLRDVFGWGNLTCPICKGLFTAINLGLKKEPNVARVGSVAIKLCNLLKIAPPAVCQSIVHLFEDDMVEVWRRSVLSPSEACGLLLGSTCGHWDIFSSWNISLPTVPKPPPKPPSPPAPGAPVSRILFLTDLHWDHDYLEGTDPDCADPLCCRRGSGLPPASRPGAGYWGEYSKCDLPLRTLESLLSGLGPAGPFDMVYWTGDIPAHDVWHQTRQDQLRALTTVTALVRKFLGPVPVYPAVGNHESTPVNSFPPPFIEGNHSSRWLYEAMAKAWEPWLPAEALRTLRIGGFYALSPYPGLRLISLNMNFCSRENFWLLINSTDPAGQLQWLVGELQAAEDRGDKVHIIGHIPPGHCLKSWSWNYYRIVARYENTLAAQFFGHTHVDEFEVFYDEETLSRPLAVAFLAPSATTYIGLNPGYRVYQIDGNYSGSSHVVLDHETYILNLTQANIPGAIPHWQLLYRARETYGLPNTLPTAWHNLVYRMRGDMQLFQTFWFLYHKGHPPSEPCGTPCRLATLCAQLSARADSPALCRHLMPDGSLPEAQSLWPRPLFC

SEQ ID NO: 840 - DNA, 2487 bp, synthetic construct
  source 1..2487: mol_type = other DNA
gacatccagatgacccagagccccagctccctgtcagccagtgtgggtgacagagtgaccatcacctgcagagccagccagagcatcagcagctacctgaactggtaccagcagaaacctggcaaagcccccaagctgctgatttatgctgctagcagcctgcagagtggagtgcccagcagattctcaggcagtggctctggcacagacttcaccctgaccatctccagcctgcagccagaagactttgccacctactactgccagcagagctacagcacccctcctatcacctttggccagggcacaagactggagatcaagggaggaggaggctctggaggaggaggctctggagggggaggctctgaggtccaactggttgaatctggagggggcctggtgcaacctggcaggagcctgagactgagctgtgctgcctctggcttcacctttgatgactatgccatgaactgggtgagacaggcccctggcaagggcctggagtgggtgtctggcatcagctggagctctggcagcatggactatgcagattctgtgaagggcaggttcaccatcagcagagataatgccaagaacagcctgtacctgcagatgaacagcctcaggacagaggacacagccctgtactactgtgccaaggccagagaagtgggtgactactatggcatggatgtgtggggccagggcaccacagtgacagtgagctctggaggaggaggctctggaggaggaggctctggagggggaggctctcaccctctttctccccaaggccatcctgccaggttacatcgcatagtgccccggctccgagatgtctttgggtgggggaacctcacctgcccaatctgcaaaggtctattcaccgccatcaacctcgggctgaagaaggaacccaatgtggctcgcgtgggctccgtggccatcaagctgtgcaatctgctgaagatagcaccacctgccgtgtgccaatccattgtccacctctttgaggatgacatggtggaggtgtggagacgctcagtgctgagcccatctgaggcctgtggcctgctcctgggctccacctgtgggcactgggacattttctcatcttggaacatctctttgcctactgtgccgaagccgccccccaaaccccctagccccccagccccaggtgcccctgtcagccgcatcctcttcctcactgacctgcactgggatcatgactacctggagggcacggaccctgactgtgcagacccactgtgctgccgccggggttctggcctgccgcccgcatcccggccaggtgccggatactggggcgaatacagcaagtgtgacctgcccctgaggaccctggagagcctgttgagtgggctgggcccagccggcccttttgatatggtgtactggacaggagacatccccgcacatgatgtctggcaccagactcgtcaggaccaactgcgggccctgaccaccgtcacagcacttgtgaggaagttcctggggccagtgccagtgtaccctgctgtgggtaaccatgaaagcacacctgtcaatagcttccctccccccttcattgagggcaaccactcctcccgctggctctatgaagcgatggccaaggcttgggagccctggctgcctgccgaagccctgcgcaccctcagaattggggggttctatgctctttccccataccccggtctccgcctcatctctctcaatatgaatttttgttcccgtgagaacttctggctcttgatcaactccacggatcccgcaggacagctccagtggctggtgggggagcttcaggctgctgaggatcgaggagacaaagtgcatataattggccacattcccccagggcactgtctgaagagctggagctggaattattaccgaattgtagccaggtatgagaacaccctggctgctcagttctttggccacactcatgtggatgaatttgaggtcttctatgatgaagagactctgagccggccgctggctgtagccttcctggcacccagtgcaactacctacatcggccttaatcctggttaccgtgtgtaccaaatagatggaaactactccgggagctctcacgtggtcctggaccatgagacctacatcctgaatctgacccaggcaaacataccgggagccataccgcactggcagcttctctacagggctcgagaaacctatgggctgcccaacacactgcctaccgcctggcacaacctggtatatcgcatgcggggcgacatgcaacttttccagaccttctggtttctctaccataagggccacccaccctcggagccctgtggcacgccctgccgtctggctactctttgtgcccagctctctgcccgtgctgacagccctgctctgtgccgccacctgatgccagatgggagcctcccagaggcccagagcctgtggccaaggccactgttttgc

SEQ ID NO: 841 - protein, 829 aa, synthetic construct
DIQMTQSPSSLSASVGDRVTITCRASQSISSYLNWYQQKPGKAPKLLIYAASSLQSGVPSRFSGSGSGTDFTLTISSLQPEDFATYYCQQSYSTPPITFGQGTRLEIKGGGGSGGGGSGGGGSEVQLVESGGGLVQPGRSLRLSCAASGFTFDDYAMNWVRQAPGKGLEWVSGISWSSGSMDYADSVKGRFTISRDNAKNSLYLQMNSLRTEDTALYYCAKAREVGDYYGMDVWGQGTTVTVSSGGGGSGGGGSGGGGSHPLSPQGHPARLHRIVPRLRDVFGWGNLTCPICKGLFTAINLGLKKEPNVARVGSVAIKLCNLLKIAPPAVCQSIVHLFEDDMVEVWRRSVLSPSEACGLLLGSTCGHWDIFSSWNISLPTVPKPPPKPPSPPAPGAPVSRILFLTDLHWDHDYLEGTDPDCADPLCCRRGSGLPPASRPGAGYWGEYSKCDLPLRTLESLLSGLGPAGPFDMVYWTGDIPAHDVWHQTRQDQLRALTTVTALVRKFLGPVPVYPAVGNHESTPVNSFPPPFIEGNHSSRWLYEAMAKAWEPWLPAEALRTLRIGGFYALSPYPGLRLISLNMNFCSRENFWLLINSTDPAGQLQWLVGELQAAEDRGDKVHIIGHIPPGHCLKSWSWNYYRIVARYENTLAAQFFGHTHVDEFEVFYDEETLSRPLAVAFLAPSATTYIGLNPGYRVYQIDGNYSGSSHVVLDHETYILNLTQANIPGAIPHWQLLYRARETYGLPNTLPTAWHNLVYRMRGDMQLFQTFWFLYHKGHPPSEPCGTPCRLATLCAQLSARADSPALCRHLMPDGSLPEAQSLWPRPLFC

SEQ ID NO: 842 - DNA, 3183 bp, synthetic construct
  source 1..3183: mol_type = other DNA
caccctctttctccccaaggccatcctgccaggttacatcgcatagtgccccggctccgagatgtctttgggtgggggaacctcacctgcccaatctgcaaaggtctattcaccgccatcaacctcgggctgaagaaggaacccaatgtggctcgcgtgggctccgtggccatcaagctgtgcaatctgctgaagatagcaccacctgccgtgtgccaatccattgtccacctctttgaggatgacatggtggaggtgtggagacgctcagtgctgagcccatctgaggcctgtggcctgctcctgggctccacctgtgggcactgggacattttctcatcttggaacatctctttgcctactgtgccgaagccgccccccaaaccccctagccccccagccccaggtgcccctgtcagccgcatcctcttcctcactgacctgcactgggatcatgactacctggagggcacggaccctgactgtgcagacccactgtgctgccgccggggttctggcctgccgcccgcatcccggccaggtgccggatactggggcgaatacagcaagtgtgacctgcccctgaggaccctggagagcctgttgagtgggctgggcccagccggcccttttgatatggtgtactggacaggagacatccccgcacatgatgtctggcaccagactcgtcaggaccaactgcgggccctgaccaccgtcacagcacttgtgaggaagttcctggggccagtgccagtgtaccctgctgtgggtaaccatgaaagcacacctgtcaatagcttccctccccccttcattgagggcaaccactcctcccgctggctctatgaagcgatggccaaggcttgggagccctggctgcctgccgaagccctgcgcaccctcagaattggggggttctatgctctttccccataccccggtctccgcctcatctctctcaatatgaatttttgttcccgtgagaacttctggctcttgatcaactccacggatcccgcaggacagctccagtggctggtgggggagcttcaggctgctgaggatcgaggagacaaagtgcatataattggccacattcccccagggcactgtctgaagagctggagctggaattattaccgaattgtagccaggtatgagaacaccctggctgctcagttctttggccacactcatgtggatgaatttgaggtcttctatgatgaagagactctgagccggccgctggctgtagccttcctggcacccagtgcaactacctacatcggccttaatcctggttaccgtgtgtaccaaatagatggaaactactccgggagctctcacgtggtcctggaccatgagacctacatcctgaatctgacccaggcaaacataccgggagccataccgcactggcagcttctctacagggctcgagaaacctatgggctgcccaacacactgcctaccgcctggcacaacctggtatatcgcatgcggggcgacatgcaacttttccagaccttctggtttctctaccataagggccacccaccctcggagccctgtggcacgccctgccgtctggctactctttgtgcccagctctctgcccgtgctgacagccctgctctgtgccgccacctgatgccagatgggagcctcccagaggcccagagcctgtggccaaggccactgttttgcgggggaggaggctcaggtgggggtggcagtgaggtccaactggttgaatctggagggggcctggtgcaacctggcaggagcctgagactgagctgtgctgcctctggcttcacctttgatgactatgccatgaactgggtgagacaggcccctggcaagggcctggagtgggtgtctggcatcagctggagctctggcagcatggactatgcagattctgtgaagggcaggttcaccatcagcagagataatgccaagaacagcctgtacctgcagatgaacagcctcaggacagaggacacagccctgtactactgtgccaaggccagagaagtgggtgactactatggcatggatgtgtggggccagggcaccacagtgacagtgagctctgcctccaccaagggcccatcggtcttccccctggcgccctgctccaggagcacctccgagagcacagccgccctgggctgcctggtcaaggactacttccccgaaccggtgacggtgtcgtggaactcaggcgccctgaccagcggcgtgcacaccttcccggctgtcctacagtcctcaggactctactccctcagcagcgtggtgaccgtgccctccagcagcttgggcacgaagacctacacctgcaacgtagatcacaagcccagcaacaccaaggtggacaagagagttgagtccaaatatggtcccccaggaagcggagctactaacttcagcctgctgaagcaggctggagacgtggaggagaaccctggacctatggcctttctgtggctgctgagctgttgggccctgctgggcaccaccttcggcgacatccagatgacccagagccccagctccctgtcagccagtgtgggtgacagagtgaccatcacctgcagagccagccagagcatcagcagctacctgaactggtaccagcagaaacctggcaaagcccccaagctgctgatttatgctgctagcagcctgcagagtggagtgcccagcagattctcaggcagtggctctggcacagacttcaccctgaccatctccagcctgcagccagaagactttgccacctactactgccagcagagctacagcacccctcctatcacctttggccagggcacaagactggagatcaagcgaactgtggctgcaccatctgtcttcatcttcccgccatctgatgagcagttgaaatctggaactgcctctgttgtgtgcctgctgaataacttctatcccagagaggccaaagtacagtggaaggtggataacgccctccaatcgggtaactcccaggagagtgtcacagagcaggacagcaaggacagcacctacagcctcagcagcaccctgacgctgagcaaagcagactacgagaaacacaaagtctacgcctgcgaagtcacccatcagggcctgagctcgcccgtcacaaagagcttcaacaggggagagtgt

SEQ ID NO: 843 - protein, 1061 aa, synthetic construct
HPLSPQGHPARLHRIVPRLRDVFGWGNLTCPICKGLFTAINLGLKKEPNVARVGSVAIKLCNLLKIAPPAVCQSIVHLFEDDMVEVWRRSVLSPSEACGLLLGSTCGHWDIFSSWNISLPTVPKPPPKPPSPPAPGAPVSRILFLTDLHWDHDYLEGTDPDCADPLCCRRGSGLPPASRPGAGYWGEYSKCDLPLRTLESLLSGLGPAGPFDMVYWTGDIPAHDVWHQTRQDQLRALTTVTALVRKFLGPVPVYPAVGNHESTPVNSFPPPFIEGNHSSRWLYEAMAKAWEPWLPAEALRTLRIGGFYALSPYPGLRLISLNMNFCSRENFWLLINSTDPAGQLQWLVGELQAAEDRGDKVHIIGHIPPGHCLKSWSWNYYRIVARYENTLAAQFFGHTHVDEFEVFYDEETLSRPLAVAFLAPSATTYIGLNPGYRVYQIDGNYSGSSHVVLDHETYILNLTQANIPGAIPHWQLLYRARETYGLPNTLPTAWHNLVYRMRGDMQLFQTFWFLYHKGHPPSEPCGTPCRLATLCAQLSARADSPALCRHLMPDGSLPEAQSLWPRPLFCGGGGSGGGGSEVQLVESGGGLVQPGRSLRLSCAASGFTFDDYAMNWVRQAPGKGLEWVSGISWSSGSMDYADSVKGRFTISRDNAKNSLYLQMNSLRTEDTALYYCAKAREVGDYYGMDVWGQGTTVTVSSASTKGPSVFPLAPCSRSTSESTAALGCLVKDYFPEPVTVSWNSGALTSGVHTFPAVLQSSGLYSLSSVVTVPSSSLGTKTYTCNVDHKPSNTKVDKRVESKYGPPGSGATNFSLLKQAGDVEENPGPMAFLWLLSCWALLGTTFGDIQMTQSPSSLSASVGDRVTITCRASQSISSYLNWYQQKPGKAPKLLIYAASSLQSGVPSRFSGSGSGTDFTLTISSLQPEDFATYYCQQSYSTPPITFGQGTRLEIKRTVAAPSVFIFPPSDEQLKSGTASVVCLLNNFYPREAKVQWKVDNALQSGNSQESVTEQDSKDSTYSLSSTLTLSKADYEKHKVYACEVTHQGLSSPVTKSFNRGEC

SEQ ID NO: 844 - DNA, 3183 bp, synthetic construct
  source 1..3183: mol_type = other DNA
caccctctttctccccaaggccatcctgccaggttacatcgcatagtgccccggctccgagatgtctttgggtgggggaacctcacctgcccaatctgcaaaggtctattcaccgccatcaacctcgggctgaagaaggaacccaatgtggctcgcgtgggctccgtggccatcaagctgtgcaatctgctgaagatagcaccacctgccgtgtgccaatccattgtccacctctttgaggatgacatggtggaggtgtggagacgctcagtgctgagcccatctgaggcctgtggcctgctcctgggctccacctgtgggcactgggacattttctcatcttggaacatctctttgcctactgtgccgaagccgccccccaaaccccctagccccccagccccaggtgcccctgtcagccgcatcctcttcctcactgacctgcactgggatcatgactacctggagggcacggaccctgactgtgcagacccactgtgctgccgccggggttctggcctgccgcccgcatcccggccaggtgccggatactggggcgaatacagcaagtgtgacctgcccctgaggaccctggagagcctgttgagtgggctgggcccagccggcccttttgatatggtgtactggacaggagacatccccgcacatgatgtctggcaccagactcgtcaggaccaactgcgggccctgaccaccgtcacagcacttgtgaggaagttcctggggccagtgccagtgtaccctgctgtgggtaaccatgaaagcacacctgtcaatagcttccctccccccttcattgagggcaaccactcctcccgctggctctatgaagcgatggccaaggcttgggagccctggctgcctgccgaagccctgcgcaccctcagaattggggggttctatgctctttccccataccccggtctccgcctcatctctctcaatatgaatttttgttcccgtgagaacttctggctcttgatcaactccacggatcccgcaggacagctccagtggctggtgggggagcttcaggctgctgaggatcgaggagacaaagtgcatataattggccacattcccccagggcactgtctgaagagctggagctggaattattaccgaattgtagccaggtatgagaacaccctggctgctcagttctttggccacactcatgtggatgaatttgaggtcttctatgatgaagagactctgagccggccgctggctgtagccttcctggcacccagtgcaactacctacatcggccttaatcctggttaccgtgtgtaccaaatagatggaaactactccgggagctctcacgtggtcctggaccatgagacctacatcctgaatctgacccaggcaaacataccgggagccataccgcactggcagcttctctacagggctcgagaaacctatgggctgcccaacacactgcctaccgcctggcacaacctggtatatcgcatgcggggcgacatgcaacttttccagaccttctggtttctctaccataagggccacccaccctcggagccctgtggcacgccctgccgtctggctactctttgtgcccagctctctgcccgtgctgacagccctgctctgtgccgccacctgatgccagatgggagcctcccagaggcccagagcctgtggccaaggccactgttttgcgggggaggaggctcaggtgggggtggcagtgacatccagatgacccagagccccagctccctgtcagccagtgtgggtgacagagtgaccatcacctgcagagccagccagagcatcagcagctacctgaactggtaccagcagaaacctggcaaagcccccaagctgctgatttatgctgctagcagcctgcagagtggagtgcccagcagattctcaggcagtggctctggcacagacttcaccctgaccatctccagcctgcagccagaagactttgccacctactactgccagcagagctacagcacccctcctatcacctttggccagggcacaagactggagatcaagcgaactgtggctgcaccatctgtcttcatcttcccgccatctgatgagcagttgaaatctggaactgcctctgttgtgtgcctgctgaataacttctatcccagagaggccaaagtacagtggaaggtggataacgccctccaatcgggtaactcccaggagagtgtcacagagcaggacagcaaggacagcacctacagcctcagcagcaccctgacgctgagcaaagcagactacgagaaacacaaagtctacgcctgcgaagtcacccatcagggcctgagctcgcccgtcacaaagagcttcaacaggggagagtgtggaagcggagctactaacttcagcctgctgaagcaggctggagacgtggaggagaaccctggacctatggcctttctgtggctgctgagctgttgggccctgctgggcaccaccttcggcgaggtccaactggttgaatctggagggggcctggtgcaacctggcaggagcctgagactgagctgtgctgcctctggcttcacctttgatgactatgccatgaactgggtgagacaggcccctggcaagggcctggagtgggtgtctggcatcagctggagctctggcagcatggactatgcagattctgtgaagggcaggttcaccatcagcagagataatgccaagaacagcctgtacctgcagatgaacagcctcaggacagaggacacagccctgtactactgtgccaaggccagagaagtgggtgactactatggcatggatgtgtggggccagggcaccacagtgacagtgagctctgcctccaccaagggcccatcggtcttccccctggcgccctgctccaggagcacctccgagagcacagccgccctgggctgcctggtcaaggactacttccccgaaccggtgacggtgtcgtggaactcaggcgccctgaccagcggcgtgcacaccttcccggctgtcctacagtcctcaggactctactccctcagcagcgtggtgaccgtgccctccagcagcttgggcacgaagacctacacctgcaacgtagatcacaagcccagcaacaccaaggtggacaagagagttgagtccaaatatggtccccca

SEQ ID NO: 845 - protein, 1061 aa, synthetic construct
HPLSPQGHPARLHRIVPRLRDVFGWGNLTCPICKGLFTAINLGLKKEPNVARVGSVAIKLCNLLKIAPPAVCQSIVHLFEDDMVEVWRRSVLSPSEACGLLLGSTCGHWDIFSSWNISLPTVPKPPPKPPSPPAPGAPVSRILFLTDLHWDHDYLEGTDPDCADPLCCRRGSGLPPASRPGAGYWGEYSKCDLPLRTLESLLSGLGPAGPFDMVYWTGDIPAHDVWHQTRQDQLRALTTVTALVRKFLGPVPVYPAVGNHESTPVNSFPPPFIEGNHSSRWLYEAMAKAWEPWLPAEALRTLRIGGFYALSPYPGLRLISLNMNFCSRENFWLLINSTDPAGQLQWLVGELQAAEDRGDKVHIIGHIPPGHCLKSWSWNYYRIVARYENTLAAQFFGHTHVDEFEVFYDEETLSRPLAVAFLAPSATTYIGLNPGYRVYQIDGNYSGSSHVVLDHETYILNLTQANIPGAIPHWQLLYRARETYGLPNTLPTAWHNLVYRMRGDMQLFQTFWFLYHKGHPPSEPCGTPCRLATLCAQLSARADSPALCRHLMPDGSLPEAQSLWPRPLFCGGGGSGGGGSDIQMTQSPSSLSASVGDRVTITCRASQSISSYLNWYQQKPGKAPKLLIYAASSLQSGVPSRFSGSGSGTDFTLTISSLQPEDFATYYCQQSYSTPPITFGQGTRLEIKRTVAAPSVFIFPPSDEQLKSGTASVVCLLNNFYPREAKVQWKVDNALQSGNSQESVTEQDSKDSTYSLSSTLTLSKADYEKHKVYACEVTHQGLSSPVTKSFNRGECGSGATNFSLLKQAGDVEENPGPMAFLWLLSCWALLGTTFGEVQLVESGGGLVQPGRSLRLSCAASGFTFDDYAMNWVRQAPGKGLEWVSGISWSSGSMDYADSVKGRFTISRDNAKNSLYLQMNSLRTEDTALYYCAKAREVGDYYGMDVWGQGTTVTVSSASTKGPSVFPLAPCSRSTSESTAALGCLVKDYFPEPVTVSWNSGALTSGVHTFPAVLQSSGLYSLSSVVTVPSSSLGTKTYTCNVDHKPSNTKVDKRVESKYGPP

SEQ ID NO: 846 - DNA, 2472 bp, synthetic construct
  source 1..2472: mol_type = other DNA
caccctctttctccccaaggccatcctgccaggttacatcgcatagtgccccggctccgagatgtctttgggtgggggaacctcacctgcccaatctgcaaaggtctattcaccgccatcaacctcgggctgaagaaggaacccaatgtggctcgcgtgggctccgtggccatcaagctgtgcaatctgctgaagatagcaccacctgccgtgtgccaatccattgtccacctctttgaggatgacatggtggaggtgtggagacgctcagtgctgagcccatctgaggcctgtggcctgctcctgggctccacctgtgggcactgggacattttctcatcttggaacatctctttgcctactgtgccgaagccgccccccaaaccccctagccccccagccccaggtgcccctgtcagccgcatcctcttcctcactgacctgcactgggatcatgactacctggagggcacggaccctgactgtgcagacccactgtgctgccgccggggttctggcctgccgcccgcatcccggccaggtgccggatactggggcgaatacagcaagtgtgacctgcccctgaggaccctggagagcctgttgagtgggctgggcccagccggcccttttgatatggtgtactggacaggagacatccccgcacatgatgtctggcaccagactcgtcaggaccaactgcgggccctgaccaccgtcacagcacttgtgaggaagttcctggggccagtgccagtgtaccctgctgtgggtaaccatgaaagcacacctgtcaatagcttccctccccccttcattgagggcaaccactcctcccgctggctctatgaagcgatggccaaggcttgggagccctggctgcctgccgaagccctgcgcaccctcagaattggggggttctatgctctttccccataccccggtctccgcctcatctctctcaatatgaatttttgttcccgtgagaacttctggctcttgatcaactccacggatcccgcaggacagctccagtggctggtgggggagcttcaggctgctgaggatcgaggagacaaagtgcatataattggccacattcccccagggcactgtctgaagagctggagctggaattattaccgaattgtagccaggtatgagaacaccctggctgctcagttctttggccacactcatgtggatgaatttgaggtcttctatgatgaagagactctgagccggccgctggctgtagccttcctggcacccagtgcaactacctacatcggccttaatcctggttaccgtgtgtaccaaatagatggaaactactccgggagctctcacgtggtcctggaccatgagacctacatcctgaatctgacccaggcaaacataccgggagccataccgcactggcagcttctctacagggctcgagaaacctatgggctgcccaacacactgcctaccgcctggcacaacctggtatatcgcatgcggggcgacatgcaacttttccagaccttctggtttctctaccataagggccacccaccctcggagccctgtggcacgccctgccgtctggctactctttgtgcccagctctctgcccgtgctgacagccctgctctgtgccgccacctgatgccagatgggagcctcccagaggcccagagcctgtggccaaggccactgttttgcgggggaggaggctcaggtgggggtggcagtgacatccagatgacccagagccccagctccctgtcagccagtgtgggtgacagagtgaccatcacctgcagagccagccagagcatcagcagctacctgaactggtaccagcagaaacctggcaaagcccccaagctgctgatttatgctgctagcagcctgcagagtggagtgcccagcagattctcaggcagtggctctggcacagacttcaccctgaccatctccagcctgcagccagaagactttgccacctactactgccagcagagctacagcacccctcctatcacctttggccagggcacaagactggagatcaagggaggaggaggctctggaggaggaggctctggagggggaggctctgaggtccaactggttgaatctggagggggcctggtgcaacctggcaggagcctgagactgagctgtgctgcctctggcttcacctttgatgactatgccatgaactgggtgagacaggcccctggcaagggcctggagtgggtgtctggcatcagctggagctctggcagcatggactatgcagattctgtgaagggcaggttcaccatcagcagagataatgccaagaacagcctgtacctgcagatgaacagcctcaggacagaggacacagccctgtactactgtgccaaggccagagaagtgggtgactactatggcatggatgtgtggggccagggcaccacagtgacagtgagctct

SEQ ID NO: 847 - protein, 824 aa, synthetic construct
HPLSPQGHPARLHRIVPRLRDVFGWGNLTCPICKGLFTAINLGLKKEPNVARVGSVAIKLCNLLKIAPPAVCQSIVHLFEDDMVEVWRRSVLSPSEACGLLLGSTCGHWDIFSSWNISLPTVPKPPPKPPSPPAPGAPVSRILFLTDLHWDHDYLEGTDPDCADPLCCRRGSGLPPASRPGAGYWGEYSKCDLPLRTLESLLSGLGPAGPFDMVYWTGDIPAHDVWHQTRQDQLRALTTVTALVRKFLGPVPVYPAVGNHESTPVNSFPPPFIEGNHSSRWLYEAMAKAWEPWLPAEALRTLRIGGFYALSPYPGLRLISLNMNFCSRENFWLLINSTDPAGQLQWLVGELQAAEDRGDKVHIIGHIPPGHCLKSWSWNYYRIVARYENTLAAQFFGHTHVDEFEVFYDEETLSRPLAVAFLAPSATTYIGLNPGYRVYQIDGNYSGSSHVVLDHETYILNLTQANIPGAIPHWQLLYRARETYGLPNTLPTAWHNLVYRMRGDMQLFQTFWFLYHKGHPPSEPCGTPCRLATLCAQLSARADSPALCRHLMPDGSLPEAQSLWPRPLFCGGGGSGGGGSDIQMTQSPSSLSASVGDRVTITCRASQSISSYLNWYQQKPGKAPKLLIYAASSLQSGVPSRFSGSGSGTDFTLTISSLQPEDFATYYCQQSYSTPPITFGQGTRLEIKGGGGSGGGGSGGGGSEVQLVESGGGLVQPGRSLRLSCAASGFTFDDYAMNWVRQAPGKGLEWVSGISWSSGSMDYADSVKGRFTISRDNAKNSLYLQMNSLRTEDTALYYCAKAREVGDYYGMDVWGQGTTVTVSS

SEQ ID NO: 848 - DNA, 2445 bp, synthetic construct
  source 1..2445: mol_type = other DNA
caccctctttctccccaaggccatcctgccaggttacatcgcatagtgccccggctccgagatgtctttgggtgggggaacctcacctgcccaatctgcaaaggtctattcaccgccatcaacctcgggctgaagaaggaacccaatgtggctcgcgtgggctccgtggccatcaagctgtgcaatctgctgaagatagcaccacctgccgtgtgccaatccattgtccacctctttgaggatgacatggtggaggtgtggagacgctcagtgctgagcccatctgaggcctgtggcctgctcctgggctccacctgtgggcactgggacattttctcatcttggaacatctctttgcctactgtgccgaagccgccccccaaaccccctagccccccagccccaggtgcccctgtcagccgcatcctcttcctcactgacctgcactgggatcatgactacctggagggcacggaccctgactgtgcagacccactgtgctgccgccggggttctggcctgccgcccgcatcccggccaggtgccggatactggggcgaatacagcaagtgtgacctgcccctgaggaccctggagagcctgttgagtgggctgggcccagccggcccttttgatatggtgtactggacaggagacatccccgcacatgatgtctggcaccagactcgtcaggaccaactgcgggccctgaccaccgtcacagcacttgtgaggaagttcctggggccagtgccagtgtaccctgctgtgggtaaccatgaaagcacacctgtcaatagcttccctccccccttcattgagggcaaccactcctcccgctggctctatgaagcgatggccaaggcttgggagccctggctgcctgccgaagccctgcgcaccctcagaattggggggttctatgctctttccccataccccggtctccgcctcatctctctcaatatgaatttttgttcccgtgagaacttctggctcttgatcaactccacggatcccgcaggacagctccagtggctggtgggggagcttcaggctgctgaggatcgaggagacaaagtgcatataattggccacattcccccagggcactgtctgaagagctggagctggaattattaccgaattgtagccaggtatgagaacaccctggctgctcagttctttggccacactcatgtggatgaatttgaggtcttctatgatgaagagactctgagccggccgctggctgtagccttcctggcacccagtgcaactacctacatcggccttaatcctggttaccgtgtgtaccaaatagatggaaactactccgggagctctcacgtggtcctggaccatgagacctacatcctgaatctgacccaggcaaacataccgggagccataccgcactggcagcttctctacagggctcgagaaacctatgggctgcccaacacactgcctaccgcctggcacaacctggtatatcgcatgcggggcgacatgcaacttttccagaccttctggtttctctaccataagggccacccaccctcggagccctgtggcacgccctgccgtctggctactctttgtgcccagctctctgcccgtgctgacagccctgctctgtgccgccacctgatgccagatgggagcctcccagaggcccagagcctgtggccaaggccactgttttgcggaggtggtggaagtgaagtacagctcgtcgaaagtggcggtggtcttgttcagcctggaaactccctcaccctctcatgtgtcgcaagtggatttactttctcaaattatggaatgcattggattaggcaagcaccaaaaaaaggacttgaatggatagctatgatatattacgactcctctaaaatgaattacgcagatactgtaaaaggcaggtttacaatttctcgggataactctaaaaacactctttaccttgaaatgaactctcttagatccgaagatacagctatgtactattgcgcagtgccaactagtcattacgtcgtcgatgtttggggacaaggcgtaagtgtaacagtcagctcaggcggcggcggaagcggagggggaggatcaggaggaggcggatccgacattcagatgacacaatccccagcatccctctcagcatcactcgaagaaatcgtaacaatcacctgtcaagcatctcaagatatcggcaactggctcgcatggtaccaacagaaacccggcaaatcccctcaacttcttatttatggcgcaacatccctcgcagacggcgttccctcaaggttctcaggctcacgatcaggcactcagttctcacttaaaatctccagagttcaagtcgaagatataggaatttattattgtctccaagcatataacacaccatggacattcggcggcggcaccaaactcgaacttaaa

SEQ ID NO: 849 - protein, 815 aa, synthetic construct
HPLSPQGHPARLHRIVPRLRDVFGWGNLTCPICKGLFTAINLGLKKEPNVARVGSVAIKLCNLLKIAPPAVCQSIVHLFEDDMVEVWRRSVLSPSEACGLLLGSTCGHWDIFSSWNISLPTVPKPPPKPPSPPAPGAPVSRILFLTDLHWDHDYLEGTDPDCADPLCCRRGSGLPPASRPGAGYWGEYSKCDLPLRTLESLLSGLGPAGPFDMVYWTGDIPAHDVWHQTRQDQLRALTTVTALVRKFLGPVPVYPAVGNHESTPVNSFPPPFIEGNHSSRWLYEAMAKAWEPWLPAEALRTLRIGGFYALSPYPGLRLISLNMNFCSRENFWLLINSTDPAGQLQWLVGELQAAEDRGDKVHIIGHIPPGHCLKSWSWNYYRIVARYENTLAAQFFGHTHVDEFEVFYDEETLSRPLAVAFLAPSATTYIGLNPGYRVYQIDGNYSGSSHVVLDHETYILNLTQANIPGAIPHWQLLYRARETYGLPNTLPTAWHNLVYRMRGDMQLFQTFWFLYHKGHPPSEPCGTPCRLATLCAQLSARADSPALCRHLMPDGSLPEAQSLWPRPLFCGGGGSEVQLVESGGGLVQPGNSLTLSCVASGFTFSNYGMHWIRQAPKKGLEWIAMIYYDSSKMNYADTVKGRFTISRDNSKNTLYLEMNSLRSEDTAMYYCAVPTSHYVVDVWGQGVSVTVSSGGGGSGGGGSGGGGSDIQMTQSPASLSASLEEIVTITCQASQDIGNWLAWYQQKPGKSPQLLIYGATSLADGVPSRFSGSRSGTQFSLKISRVQVEDIGIYYCLQAYNTPWTFGGGTKLELK

SEQ ID NO: 850 - DNA, 2580 bp, synthetic construct
  source 1..2580: mol_type = other DNA
caccctctttctccccaaggccatcctgccaggttacatcgcatagtgccccggctccgagatgtctttgggtgggggaacctcacctgcccaatctgcaaaggtctattcaccgccatcaacctcgggctgaagaaggaacccaatgtggctcgcgtgggctccgtggccatcaagctgtgcaatctgctgaagatagcaccacctgccgtgtgccaatccattgtccacctctttgaggatgacatggtggaggtgtggagacgctcagtgctgagcccatctgaggcctgtggcctgctcctgggctccacctgtgggcactgggacattttctcatcttggaacatctctttgcctactgtgccgaagccgccccccaaaccccctagccccccagccccaggtgcccctgtcagccgcatcctcttcctcactgacctgcactgggatcatgactacctggagggcacggaccctgactgtgcagacccactgtgctgccgccggggttctggcctgccgcccgcatcccggccaggtgccggatactggggcgaatacagcaagtgtgacctgcccctgaggaccctggagagcctgttgagtgggctgggcccagccggcccttttgatatggtgtactggacaggagacatccccgcacatgatgtctggcaccagactcgtcaggaccaactgcgggccctgaccaccgtcacagcacttgtgaggaagttcctggggccagtgccagtgtaccctgctgtgggtaaccatgaaagcacacctgtcaatagcttccctccccccttcattgagggcaaccactcctcccgctggctctatgaagcgatggccaaggcttgggagccctggctgcctgccgaagccctgcgcaccctcagaattggggggttctatgctctttccccataccccggtctccgcctcatctctctcaatatgaatttttgttcccgtgagaacttctggctcttgatcaactccacggatcccgcaggacagctccagtggctggtgggggagcttcaggctgctgaggatcgaggagacaaagtgcatataattggccacattcccccagggcactgtctgaagagctggagctggaattattaccgaattgtagccaggtatgagaacaccctggctgctcagttctttggccacactcatgtggatgaatttgaggtcttctatgatgaagagactctgagccggccgctggctgtagccttcctggcacccagtgcaactacctacatcggccttaatcctggttaccgtgtgtaccaaatagatggaaactactccgggagctctcacgtggtcctggaccatgagacctacatcctgaatctgacccaggcaaacataccgggagccataccgcactggcagcttctctacagggctcgagaaacctatgggctgcccaacacactgcctaccgcctggcacaacctggtatatcgcatgcggggcgacatgcaacttttccagaccttctggtttctctaccataagggccacccaccctcggagccctgtggcacgccctgccgtctggctactctttgtgcccagctctctgcccgtgctgacagccctgctctgtgccgccacctgatgccagatgggagcctcccagaggcccagagcctgtggccaaggccactgttttgcgctgaggccgcggccaaggaagcggctgcaaaggaggctgctgcaaaagaggccgctgctaaagccctggaggcagaagcagcagccaaggaggcggcagctaaggaagccgcagccaaagaagctgccgccaaggccgacatccagatgacccagagccccagctccctgtcagccagtgtgggtgacagagtgaccatcacctgcagagccagccagagcatcagcagctacctgaactggtaccagcagaaacctggcaaagcccccaagctgctgatttatgctgctagcagcctgcagagtggagtgcccagcagattctcaggcagtggctctggcacagacttcaccctgaccatctccagcctgcagccagaagactttgccacctactactgccagcagagctacagcacccctcctatcacctttggccagggcacaagactggagatcaagggaggaggaggctctggaggaggaggctctggagggggaggctctgaggtccaactggttgaatctggagggggcctggtgcaacctggcaggagcctgagactgagctgtgctgcctctggcttcacctttgatgactatgccatgaactgggtgagacaggcccctggcaagggcctggagtgggtgtctggcatcagctggagctctggcagcatggactatgcagattctgtgaagggcaggttcaccatcagcagagataatgccaagaacagcctgtacctgcagatgaacagcctcaggacagaggacacagccctgtactactgtgccaaggccagagaagtgggtgactactatggcatggatgtgtggggccagggcaccacagtgacagtgagctct

SEQ ID NO: 851 - protein, 860 aa, synthetic construct
HPLSPQGHPARLHRIVPRLRDVFGWGNLTCPICKGLFTAINLGLKKEPNVARVGSVAIKLCNLLKIAPPAVCQSIVHLFEDDMVEVWRRSVLSPSEACGLLLGSTCGHWDIFSSWNISLPTVPKPPPKPPSPPAPGAPVSRILFLTDLHWDHDYLEGTDPDCADPLCCRRGSGLPPASRPGAGYWGEYSKCDLPLRTLESLLSGLGPAGPFDMVYWTGDIPAHDVWHQTRQDQLRALTTVTALVRKFLGPVPVYPAVGNHESTPVNSFPPPFIEGNHSSRWLYEAMAKAWEPWLPAEALRTLRIGGFYALSPYPGLRLISLNMNFCSRENFWLLINSTDPAGQLQWLVGELQAAEDRGDKVHIIGHIPPGHCLKSWSWNYYRIVARYENTLAAQFFGHTHVDEFEVFYDEETLSRPLAVAFLAPSATTYIGLNPGYRVYQIDGNYSGSSHVVLDHETYILNLTQANIPGAIPHWQLLYRARETYGLPNTLPTAWHNLVYRMRGDMQLFQTFWFLYHKGHPPSEPCGTPCRLATLCAQLSARADSPALCRHLMPDGSLPEAQSLWPRPLFCAEAAAKEAAAKEAAAKEAAAKALEAEAAAKEAAAKEAAAKEAAAKADIQMTQSPSSLSASVGDRVTITCRASQSISSYLNWYQQKPGKAPKLLIYAASSLQSGVPSRFSGSGSGTDFTLTISSLQPEDFATYYCQQSYSTPPITFGQGTRLEIKGGGGSGGGGSGGGGSEVQLVESGGGLVQPGRSLRLSCAASGFTFDDYAMNWVRQAPGKGLEWVSGISWSSGSMDYADSVKGRFTISRDNAKNSLYLQMNSLRTEDTALYYCAKAREVGDYYGMDVWGQGTTVTVSS

SEQ ID NO: 852 - DNA, 2487 bp, synthetic construct
  source 1..2487: mol_type = other DNA
caccctctttctccccaaggccatcctgccaggttacatcgcatagtgccccggctccgagatgtctttgggtgggggaacctcacctgcccaatctgcaaaggtctattcaccgccatcaacctcgggctgaagaaggaacccaatgtggctcgcgtgggctccgtggccatcaagctgtgcaatctgctgaagatagcaccacctgccgtgtgccaatccattgtccacctctttgaggatgacatggtggaggtgtggagacgctcagtgctgagcccatctgaggcctgtggcctgctcctgggctccacctgtgggcactgggacattttctcatcttggaacatctctttgcctactgtgccgaagccgccccccaaaccccctagccccccagccccaggtgcccctgtcagccgcatcctcttcctcactgacctgcactgggatcatgactacctggagggcacggaccctgactgtgcagacccactgtgctgccgccggggttctggcctgccgcccgcatcccggccaggtgccggatactggggcgaatacagcaagtgtgacctgcccctgaggaccctggagagcctgttgagtgggctgggcccagccggcccttttgatatggtgtactggacaggagacatccccgcacatgatgtctggcaccagactcgtcaggaccaactgcgggccctgaccaccgtcacagcacttgtgaggaagttcctggggccagtgccagtgtaccctgctgtgggtaaccatgaaagcacacctgtcaatagcttccctccccccttcattgagggcaaccactcctcccgctggctctatgaagcgatggccaaggcttgggagccctggctgcctgccgaagccctgcgcaccctcagaattggggggttctatgctctttccccataccccggtctccgcctcatctctctcaatatgaatttttgttcccgtgagaacttctggctcttgatcaactccacggatcccgcaggacagctccagtggctggtgggggagcttcaggctgctgaggatcgaggagacaaagtgcatataattggccacattcccccagggcactgtctgaagagctggagctggaattattaccgaattgtagccaggtatgagaacaccctggctgctcagttctttggccacactcatgtggatgaatttgaggtcttctatgatgaagagactctgagccggccgctggctgtagccttcctggcacccagtgcaactacctacatcggccttaatcctggttaccgtgtgtaccaaatagatggaaactactccgggagctctcacgtggtcctggaccatgagacctacatcctgaatctgacccaggcaaacataccgggagccataccgcactggcagcttctctacagggctcgagaaacctatgggctgcccaacacactgcctaccgcctggcacaacctggtatatcgcatgcggggcgacatgcaacttttccagaccttctggtttctctaccataagggccacccaccctcggagccctgtggcacgccctgccgtctggctactctttgtgcccagctctctgcccgtgctgacagccctgctctgtgccgccacctgatgccagatgggagcctcccagaggcccagagcctgtggccaaggccactgttttgcggaggaggaggctctggaggaggaggctctggagggggaggctctgacatccagatgacccagagccccagctccctgtcagccagtgtgggtgacagagtgaccatcacctgcagagccagccagagcatcagcagctacctgaactggtaccagcagaaacctggcaaagcccccaagctgctgatttatgctgctagcagcctgcagagtggagtgcccagcagattctcaggcagtggctctggcacagacttcaccctgaccatctccagcctgcagccagaagactttgccacctactactgccagcagagctacagcacccctcctatcacctttggccagggcacaagactggagatcaagggaggaggaggctctggaggaggaggctctggagggggaggctctgaggtccaactggttgaatctggagggggcctggtgcaacctggcaggagcctgagactgagctgtgctgcctctggcttcacctttgatgactatgccatgaactgggtgagacaggcccctggcaagggcctggagtgggtgtctggcatcagctggagctctggcagcatggactatgcagattctgtgaagggcaggttcaccatcagcagagataatgccaagaacagcctgtacctgcagatgaacagcctcaggacagaggacacagccctgtactactgtgccaaggccagagaagtgggtgactactatggcatggatgtgtggggccagggcaccacagtgacagtgagctct

SEQ ID NO: 853 - protein, 829 aa, synthetic construct
HPLSPQGHPARLHRIVPRLRDVFGWGNLTCPICKGLFTAINLGLKKEPNVARVGSVAIKLCNLLKIAPPAVCQSIVHLFEDDMVEVWRRSVLSPSEACGLLLGSTCGHWDIFSSWNISLPTVPKPPPKPPSPPAPGAPVSRILFLTDLHWDHDYLEGTDPDCADPLCCRRGSGLPPASRPGAGYWGEYSKCDLPLRTLESLLSGLGPAGPFDMVYWTGDIPAHDVWHQTRQDQLRALTTVTALVRKFLGPVPVYPAVGNHESTPVNSFPPPFIEGNHSSRWLYEAMAKAWEPWLPAEALRTLRIGGFYALSPYPGLRLISLNMNFCSRENFWLLINSTDPAGQLQWLVGELQAAEDRGDKVHIIGHIPPGHCLKSWSWNYYRIVARYENTLAAQFFGHTHVDEFEVFYDEETLSRPLAVAFLAPSATTYIGLNPGYRVYQIDGNYSGSSHVVLDHETYILNLTQANIPGAIPHWQLLYRARETYGLPNTLPTAWHNLVYRMRGDMQLFQTFWFLYHKGHPPSEPCGTPCRLATLCAQLSARADSPALCRHLMPDGSLPEAQSLWPRPLFCGGGGSGGGGSGGGGSDIQMTQSPSSLSASVGDRVTITCRASQSISSYLNWYQQKPGKAPKLLIYAASSLQSGVPSRFSGSGSGTDFTLTISSLQPEDFATYYCQQSYSTPPITFGQGTRLEIKGGGGSGGGGSGGGGSEVQLVESGGGLVQPGRSLRLSCAASGFTFDDYAMNWVRQAPGKGLEWVSGISWSSGSMDYADSVKGRFTISRDNAKNSLYLQMNSLRTEDTALYYCAKAREVGDYYGMDVWGQGTTVTVSS

SEQ ID NO: 854 - DNA, 2472 bp, synthetic construct
  source 1..2472: mol_type = other DNA
gaggtccaactggttgaatctggagggggcctggtgcaacctggcaggagcctgagactgagctgtgctgcctctggcttcacctttgatgactatgccatgaactgggtgagacaggcccctggcaagggcctggagtgggtgtctggcatcagctggagctctggcagcatggactatgcagattctgtgaagggcaggttcaccatcagcagagataatgccaagaacagcctgtacctgcagatgaacagcctcaggacagaggacacagccctgtactactgtgccaaggccagagaagtgggtgactactatggcatggatgtgtggggccagggcaccacagtgacagtgagctctggaggaggaggctctggaggaggaggctctggagggggaggctctgacatccagatgacccagagccccagctccctgtcagccagtgtgggtgacagagtgaccatcacctgcagagccagccagagcatcagcagctacctgaactggtaccagcagaaacctggcaaagcccccaagctgctgatttatgctgctagcagcctgcagagtggagtgcccagcagattctcaggcagtggctctggcacagacttcaccctgaccatctccagcctgcagccagaagactttgccacctactactgccagcagagctacagcacccctcctatcacctttggccagggcacaagactggagatcaaggggggaggaggctcaggtgggggtggcagtcaccctctttctccccaaggccatcctgccaggttacatcgcatagtgccccggctccgagatgtctttgggtgggggaacctcacctgcccaatctgcaaaggtctattcaccgccatcaacctcgggctgaagaaggaacccaatgtggctcgcgtgggctccgtggccatcaagctgtgcaatctgctgaagatagcaccacctgccgtgtgccaatccattgtccacctctttgaggatgacatggtggaggtgtggagacgctcagtgctgagcccatctgaggcctgtggcctgctcctgggctccacctgtgggcactgggacattttctcatcttggaacatctctttgcctactgtgccgaagccgccccccaaaccccctagccccccagccccaggtgcccctgtcagccgcatcctcttcctcactgacctgcactgggatcatgactacctggagggcacggaccctgactgtgcagacccactgtgctgccgccggggttctggcctgccgcccgcatcccggccaggtgccggatactggggcgaatacagcaagtgtgacctgcccctgaggaccctggagagcctgttgagtgggctgggcccagccggcccttttgatatggtgtactggacaggagacatccccgcacatgatgtctggcaccagactcgtcaggaccaactgcgggccctgaccaccgtcacagcacttgtgaggaagttcctggggccagtgccagtgtaccctgctgtgggtaaccatgaaagcacacctgtcaatagcttccctccccccttcattgagggcaaccactcctcccgctggctctatgaagcgatggccaaggcttgggagccctggctgcctgccgaagccctgcgcaccctcagaattggggggttctatgctctttccccataccccggtctccgcctcatctctctcaatatgaatttttgttcccgtgagaacttctggctcttgatcaactccacggatcccgcaggacagctccagtggctggtgggggagcttcaggctgctgaggatcgaggagacaaagtgcatataattggccacattcccccagggcactgtctgaagagctggagctggaattattaccgaattgtagccaggtatgagaacaccctggctgctcagttctttggccacactcatgtggatgaatttgaggtcttctatgatgaagagactctgagccggccgctggctgtagccttcctggcacccagtgcaactacctacatcggccttaatcctggttaccgtgtgtaccaaatagatggaaactactccgggagctctcacgtggtcctggaccatgagacctacatcctgaatctgacccaggcaaacataccgggagccataccgcactggcagcttctctacagggctcgagaaacctatgggctgcccaacacactgcctaccgcctggcacaacctggtatatcgcatgcggggcgacatgcaacttttccagaccttctggtttctctaccataagggccacccaccctcggagccctgtggcacgccctgccgtctggctactctttgtgcccagctctctgcccgtgctgacagccctgctctgtgccgccacctgatgccagatgggagcctcccagaggcccagagcctgtggccaaggccactgttttgc

SEQ ID NO: 855 - protein, 824 aa, synthetic construct
EVQLVESGGGLVQPGRSLRLSCAASGFTFDDYAMNWVRQAPGKGLEWVSGISWSSGSMDYADSVKGRFTISRDNAKNSLYLQMNSLRTEDTALYYCAKAREVGDYYGMDVWGQGTTVTVSSGGGGSGGGGSGGGGSDIQMTQSPSSLSASVGDRVTITCRASQSISSYLNWYQQKPGKAPKLLIYAASSLQSGVPSRFSGSGSGTDFTLTISSLQPEDFATYYCQQSYSTPPITFGQGTRLEIKGGGGSGGGGSHPLSPQGHPARLHRIVPRLRDVFGWGNLTCPICKGLFTAINLGLKKEPNVARVGSVAIKLCNLLKIAPPAVCQSIVHLFEDDMVEVWRRSVLSPSEACGLLLGSTCGHWDIFSSWNISLPTVPKPPPKPPSPPAPGAPVSRILFLTDLHWDHDYLEGTDPDCADPLCCRRGSGLPPASRPGAGYWGEYSKCDLPLRTLESLLSGLGPAGPFDMVYWTGDIPAHDVWHQTRQDQLRALTTVTALVRKFLGPVPVYPAVGNHESTPVNSFPPPFIEGNHSSRWLYEAMAKAWEPWLPAEALRTLRIGGFYALSPYPGLRLISLNMNFCSRENFWLLINSTDPAGQLQWLVGELQAAEDRGDKVHIIGHIPPGHCLKSWSWNYYRIVARYENTLAAQFFGHTHVDEFEVFYDEETLSRPLAVAFLAPSATTYIGLNPGYRVYQIDGNYSGSSHVVLDHETYILNLTQANIPGAIPHWQLLYRARETYGLPNTLPTAWHNLVYRMRGDMQLFQTFWFLYHKGHPPSEPCGTPCRLATLCAQLSARADSPALCRHLMPDGSLPEAQSLWPRPLFC

SEQ ID NO: 856 - DNA, 2038 bp, synthetic construct
  source 1..2038: mol_type = other DNA
atgcacagacctagacgtcgtggaactcgtccacctccactggcactgctcgctgctctcctcctggctgcacgtggtgctgatgcacaccctctttctccccaaggccatcctgccaggttacatcgcatagtgccccggctccgagatgtctttgggtgggggaacctcacctgcccaatctgcaaaggtctattcaccgccatcaacctcgggctgaagaaggaacccaatgtggctcgcgtgggctccgtggccatcaagctgtgcaatctgctgaagatagcaccacctgccgtgtgccaatccattgtccacctctttgaggatgacatggtggaggtgtggagacgctcagtgctgagcccatctgaggcctgtggcctgctcctgggctccacctgtgggcactgggacattttctcatcttggaacatctctttgcctactgtgccgaagccgccccccaaaccccctagccccccagccccaggtgcccctgtcagccgcatcctcttcctcactgacctgcactgggatcatgactacctggagggcacggaccctgactgtgcagacccactgtgctgccgccggggttctggcctgccgcccgcatcccggccaggtgccggatactggggcgaatacagcaagtgtgacctgcccctgaggaccctggagagcctgttgagtgggctgggcccagccggcccttttgatatggtgtactggacaggagacatccccgcacatgatgtctggcaccagactcgtcaggaccaactgcgggccctgaccaccgtcacagcacttgtgaggaagttcctggggccagtgccagtgtaccctgctgtgggtaaccatgaaagcacacctgtcaatagcttccctccccccttcattgagggcaaccactcctcccgctggctctatgaagcgatggccaaggcttgggagccctggctgcctgccgaagccctgcgcaccctcagaattggggggttctatgctctttccccataccccggtctccgcctcatctctctcaatatgaatttttgttcccgtgagaacttctggctcttgatcaactccacggatcccgcaggacagctccagtggctggtgggggagcttcaggctgctgaggatcgaggagacaaagtgcatataattggccacattcccccagggcactgtctgaagagctggagctggaattattaccgaattgtagccaggtatgagaacaccctggctgctcagttctttggccacactcatgtggatgaatttgaggtcttctatgatgaagagactctgagccggccgctggctgtagccttcctggcacccagtgcaactacctacatcggccttaatcctggttaccgtgtgtaccaaatagatggaaactactccgggagctctcacgtggtcctggaccatgagacctacatcctgaatctgacccaggcaaacataccgggagccataccgcactggcagcttctctacagggctcgagaaacctatgggctgcccaacacactgcctaccgcctggcacaacctggtatatcgcatgcggggcgacatgcaacttttccagaccttctggtttctctaccataagggccacccaccctcggagccctgtggcacgccctgccgtctggctactctttgtgcccagctctctgcccgtgctgacagccctgctctgtgccgccacctgatgccagatgggagcctcccagaggcccagagcctgtggccaaggccactgttttgctaggcggccgctaatcagccataccacatttgtagaggttttacttgctttaaaaaacctcccacacctccccctgaacctgaaacataaaatgaatgcaattgttgttgttaacttgtttattgcagcttataatggttacaaataaagcaatagcatcacaaatttcacaaataaagcatttttttcactgcattctagttgtggtttgtccaaactcatcaatgtatcttatcatgtc

SEQ ID NO: 857 - DNA, 2785 bp, synthetic construct; identical to SEQ ID NO: 750
  source 1..2785: mol_type = other DNA
